(19) United States
(12) Patent Application Publication
(10) Pub. No.: US 2021/0230632 A1
(43) Pub. Date: Jul. 29, 2021

(54) COMPOSITIONS AND METHODS FOR DELIVERY OF AAV

(71) Applicant: VOYAGER THERAPEUTICS, INC., Cambridge, MA (US)

(72) Inventors: Dinah Wen-Yee Sah, Cambridge, MA (US); Holger Patzke, Cambridge, MA (US); Todd Carter, Cambridge, MA (US); Jinzhao Hou, Lexington, MA (US); Giridhar Murlidharan, Cambridge, MA (US)

(21) Appl. No.: 17/055,416

(22) PCT Filed: May 15, 2019
(86) PCT No.: PCT/US2019/032387

§ 371 Date: Nov. 13, 2020

Related U.S. Application Data
(60) Provisional application No. 62/671,924, filed on May 15, 2018.
(60) Provisional application No. 62/714,121, filed on Aug. 3, 2018.
(60) Provisional application No. 62/835,841, filed on Apr. 18, 2019.

(51) Int. Cl. C12N 15/86; C12N 7/00; A61P 25/28; A61K 9/00; C12N 15/113

(52) U.S. Cl. CPC C12N 15/86; C12N 7/00; A61P 25/28; A61K 9/0019; A61K 48/00; C12N 2750/14122; C12N 2750/14143; C12N 2750/14145; C12N 15/113

(57) ABSTRACT

The disclosure provides compositions and methods for the preparation, manufacture, formulation and therapeutic use of adeno-associated virus (AAV) particles for the prevention and/or treatment of diseases.

[0001] This application claims the benefit of U.S. Provisional Patent Application No. 62/671,924, entitled “Compositions and methods for delivery of AAV”, filed May 15, 2018, U.S. Provisional Patent Application No. 62/714,121, entitled “Compositions and methods for delivery of AAV” filed Aug. 3, 2018, and U.S. Provisional Patent Application No. 62/835,841, entitled “Compositions and methods for delivery of AAV”, filed Apr. 18, 2019; the contents of each of which are herein incorporated by reference in their entirety.

### REFERENCE TO THE SEQUENCE LISTING

[0002] The present application is being filed along with a Sequence Listing in electronic format. The Sequence Listing is provided as a file entitled 20571067PCTSEQLST.txt, created on May 15, 2019, which is 6,755,822 bytes in size. The information in the electronic format of the Sequence Listing is incorporated herein by reference in its entirety.

### FIELD OF THE DISCLOSURE

[0003] The present disclosure relates to compositions, methods and processes for the design, preparation, manufacture, use and/or formulation of adeno-associated virus capsids for improved biodistribution, e.g., improved biodistribution in the central nervous system.

### BACKGROUND

[0004] Adeno-associated viral (AAV) vectors are a promising candidate for therapeutic gene delivery and have proven safe and efficacious in clinical trial.

[0005] Delivery of AAV to some systems in the body has proven to be particularly challenging, requiring invasive surgeries for sufficient levels of gene transfer. For some body systems, intravenous delivery has historically resulted in limited gene transfer, in part due to inefficient transduction into cells. There remains a need in the art for AAV vectors that may be administered by intravenous delivery and yet are able to efficiently target regions critical for treating a multitude of diseases.

[0006] One example of a system where delivery is challenging is the central nervous system. Delivery of AAV to regions of the central nervous system (CNS) has proven to be particularly challenging, requiring invasive surgeries for sufficient levels of gene transfer (See e.g., Bevan et al. Mol Ther. 2011 November; 19(11): 1971-1980). Intravenous delivery has historically resulted in limited gene transfer to the CNS, in part due to the presence of the blood brain barrier (BBB). There remains a need in the art for AAV vectors that may be administered by intravenous delivery and yet are able to efficiently cross the blood brain barrier and target regions of the CNS critical for treating a multitude of CNS diseases.

[0007] The present disclosure addresses this need by providing novel AAV particles with engineered capsid proteins that allow for efficient transduction of CNS tissues following intravenous delivery. Improved CNS transduction may facilitate treatment of CNS disorders with intravenous delivery. Further, the viral genomes of these AAV particles may be altered to suit the needs of any number of CNS diseases, providing platform capsids for crossing the blood brain barrier and targeting of CNS tissues.

### SUMMARY

[0008] The instant disclosure provides an adeno-associated viral (AAV) particle comprising a capsid and a viral genome. The AAV particles transduce to the blood brain barrier upon delivery of the AAV particles to a subject.

[0009] The AAV particle may comprise a capsid or a peptide insert such as, but not limited to, VOY101, VOY201, VOY801, VOY1101, AAVPHP.B (PHP.B), AAVPHP.A (PHP.A), AAVG2B-26, AAVG2B-13, AAVTH1.1-32, AAVTH1.1-35, AAVPHP.B2 (PHP.B2), AAVPHP.B3 (PHP.B3), AAVPHP.N/PHP.B-DGT, AAVPHP.B-EST, AAVPHP.B-GGT, AAVPHP.B-ATP, AAVPHP.B-ATT-T, AAVPHP.B-DGT-T, AAVPHP.B-GGT-T, AAVPHP.B-SGS, AAVPHP.B-AQP, AAVPHP.B-QQP, AAVPHP.B-SNP(3), AAVPHP.B-SNP, AAVPHP.B-QGT, AAVPHP.B-NQT, AAVPHP.B-EGS, AAVPHP.B-SGN, AAVPHP.B-EGT, AAVPHP.B-DST, AAVPHP.B-DST, AAVPHP.B-STP, AAVPHP.B-PQP, AAVPHP.B-SQP, AAVPHP.B-QLP, AAVPHP.B-TMP, AAVPHP.B-TTP, AAVPHP.S/G2A12, AAVG2A15/G2A3 (G2A3), AAVG2B4 (G2B4), AAVG2B5 (G2B5), PHP.S, AAV1, AAV2, AAV2G9, AAV3, AAV3a, AAV3b, AAV3-3, AAV4, AAV4-4, AAV5, AAV6, AAV6.1, AAV6.2, AAV6.1.2, AAV7, AAV7.2, AAV8, AAV9, AAV9.11, AAV9.13, AAV9.16, AAV9.24, AAV9.45, AAV9.47, AAV9.61, AAV9.68, AAV9.84, AAV9.9, AAV10, AAV11, AAV12, AAV16.3, AAV24.1, AAV27.3, AAV42.12, AAV42-1b, AAV42-2, AAV42-3a, AAV42-3b, AAV42-4, AAV42-5a, AAV42-5b, AAV42-6b, AAV42-8, AAV42-10, AAV42-11, AAV42-12, AAV42-13, AAV42-15, AAV42-aa, AAV43-1, AAV43-12, AAV43-20, AAV43-21, AAV43-23, AAV43-25, AAV43-5, AAV44.1, AAV44.2, AAV44.5, AAV223.1, AAV223.2, AAV223.4, AAV223.5, AAV223.6, AAV223.7, AAV1-7/rh.48, AAV1-8/rh.49, AAV2-15/rh.62, AAV2-3/rh.61, AAV2-4/rh.50, AAV2-5/rh.51, AAV3.1/hu.6, AAV3.1/hu.9, AAV3-9/rh.52, AAV3-11/rh.53, AAV4-8/r11.64, AAV4-9/rh.54, AAV4-19/rh.55, AAV5-3/rh.57, AAV5-22/rh.58, AAV7.3/hu.7, AAV16.8/hu.10, AAV16.12/hu.11, AAV29.3/bb.1, AAV29.5/bb.2, AAV106.1/hu.37, AAV114.3/hu.40, AAV127.2/hu.41, AAV127.5/hu.42, AAV128.3/hu.44, AAV130.4/hu.48, AAV145.1/hu.53, AAV145.5/hu.54, AAV145.6/hu.55, AAV161.10/hu.60, AAV161.6/hu.61, AAV33.12/hu.17, AAV33.4/hu.15, AAV33.8/hu.16, AAV52/hu.19, AAV52.1/hu.20, AAV58.2/hu.25, AAVA3.3. AAVA3.4, AAVA3.5. AAVA3.7, AAVC1, AAVC2, AAVC5, AAV-DJ, AAV-DJ8, AAVF3, AAVF5, AAVH2, AAVrh.72, AAVhu.8, AAVrh.68, AAVrh.70, AAVpi.1, AAVpi.3, AAVpi.2, AAVrh.60, AAVrh.44, AAVrh.65, AAVrh.55, AAVrh.47, AAVrh.69, AAVrh.45, AAVrh.59, AAVhu.12, AAVH6, AAVLK03, AAVH-1/hu.1, AAVH-5/hu.3. AAVLG-10/rh.40. AAVLG-4/rh.38, AAVLG-9/hu.39, AAVN721-8/rh.43, AAVCh.5, AAVCh.5R1, AAVcy.2, AAVcy.3, AAVcy.4, AAVcy.5, AAVCy.5R1. AAVCy.5R2, AAVCy.5R3, AAVCy.5R4, AAVcy.6, AAVhu.1. AAVhu.2, AAVhu.3, AAVhu.4, AAVhu.5, AAVhu.6. AAVhu.7, AAVhu.9, AAVhu.10, AAVhu.11, AAVhu.13, AAVhu.15, AAVhu.16, AAVhu.17, AAVhu.18, AAVhu.20, AAVhu.21, AAVhu.22, AAVhu.23.2, AAVhu.24, AAVhu.25, AAVhu.27, AAVhu.28, AAVhu.29, AAVhu.29R, AAVhu.31, AAVhu.32, AAVhu.34, AAVhu.35, AAVhu.37, AAVhu.39, AAVhu.40, AAVhu.41. AAVhu.42. AAVhu.43. AAVhu.44, AAVhu.44R1. AAVhu.44R2, AAVhu.44R3, AAVhu.45, AAVhu.46, AAVhu.47, AAVhu.48, AAVhu.48R1, AAVhu.48R2, AAVhu.48R3, AAVhu.49, AAVhu.51. AAVhu.52, AAVhu.54, AAVhu.55, AAVhu.56, AAVhu.57, AAVhu.58, AAVhu.60, AAVhu.61, AAVhu.63, AAVhu.64, AAVhu.66, AAVhu.67, AAVhu.14/9, AAVhu.t 19, AAVrh.2, AAVrh.2R, AAVrh.8, AAVrh.8R, AAVrh.10. AAVrh.12, AAVrh.13, AAVrh.13R, AAVrh.14, AAVrh.17, AAVrh.18, AAVrh.19, AAVrh.20, AAVrh.21, AAVrh.22, AAVrh.23, AAVrh.24, AAVrh.25, AAVrh.31. AAVrh.32. AAVrh.33, AAVrh.34, AAVrh.35, AAVrh.36, AAVrh.37, AAVrh.37R2, AAVrh.38, AAVrh.39, AAVrh.40, AAVrh.46, AAVrh.48, AAVrh.48.1, AAVrh.48.1.2, AAVrh.48.2, AAVrh.49, AAVrh.51, AAVrh.52, AAVrh.53, AAVrh.54, AAVrh.56, AAVrh.57, AAVrh.58, AAVrh.61, AAVrh.64, AAVrh.64R1, AAVrh.64R2, AAVrh.67, AAVrh.73, AAVrh.74, AAVrh8R, AAVrh8R A586R mutant, AAVrh8R R533A mutant, AAAV, BAAV, caprine AAV, bovine AAV, AAVhE1.1, AAVhEr1.5, AAVhER1.14, AAVhEr1.8, AAVhEr1.16, AAVhEr1.18, AAVhEr1.35, AAVhEr1.7, AAVhEr1.36, AAVhEr2.29, AAVhEr2.4, AAVhEr2.16, AAVhEr2.30, AAVhEr2.31, AAVhEr2.36, AAVhER1.23, AAVhEr3.1, AAV2.5T, AAV-PAEC, AAV-LK01, AAV-LK02, AAV-LK03, AAV-LK04, AAV-LK05, AAV-LK06, AAV-LK07, AAV-LK08, AAV-LK09, AAV-LK10, AAV-LK11, AAV-LK12, AAV-LK13, AAV-LK14, AAV-LK15, AAV-LK16, AAV-LK17, AAV-LK18, AAV-LK19, AAV-PAEC2, AAV-PAEC4, AAV-PAEC6, AAV-PAEC7, AAV-PAEC8, AAV-PAEC11, AAV-PAEC12, AAV-2-pre-miRNA-101, AAV-8h, AAV-8b, AAV-h, AAV-b, AAV SM 10-2, AAV Shuffle 100-1, AAV Shuffle 100-3, AAV Shuffle 100-7, AAV Shuffle 10-2, AAV Shuffle 10-6, AAV Shuffle 10-8, AAV Shuffle 100-2, AAV SM 10-1, AAV SM 10-8. AAV SM 100-3, AAV SM 100-10, BNP61 AAV, BNP62 AAV. BNP63 AAV, AAVrh.50, AAVrh.43, AAVrh.62, AAVrh.48, AAVhu.19, AAVhu.11, AAVhu.53, AAV4-8/rh.64, AAVLG-9/hu.39, AAV54.5/hu.23, AAV54.2/hu.22, AAV54.7/hu.24, AAV54.1/hu.21, AAV54.4R/hu.27, AAV46.2/hu.28, AAV46.6/hu.29, AAV128.1/hu.43, true type AAV (tAAV), UPENN AAV 10, Japanese AAV10 serotypes, AAV CBr-7.1, AAV CBr-7.10, AAV CBr-7.2, AAV CBr-7.3, AAV CBr-7.4, AAV CBr-7.5, AAV CBr-7.7, AAV CBr-7.8, AAV CBr-B7.3, AAV CBr-B7.4, AAV CBr-E1, AAV CBr-E2, AAV CBr-E3, AAV CBr-E4, AAV CBr-E5, AAV CBr-e5, AAV CBr-E6, AAV CBr-E7, AAV CBr-E8, AAV CHt-1, AAV CHt-2. AAV CHt-3. AAV CHt-6.1, AAV CHt-6.10, AAV CHt-6.5, AAV CHt-6.6, AAV CHt-6.7, AAV CHt-6.8, AAV CHt-P1, AAV CHt-P2, AAV CHt-P5, AAV CHt-P6, AAV CHt-P8, AAV CHt-P9, AAV CKd-1, AAV CKd-10, AAV CKd-2, AAV CKd-3, AAV CKd-4, AAV CKd-6, AAV CKd-7. AAV CKd-8, AAV CKd-B1, AAV CKd-B2, AAV CKd-B3, AAV CKd-B4, AAV CKd-B5, AAV CKd-B6, AAV CKd-B7, AAV CKd-B8, AAV CKd-H1, AAV CKd-H2, AAV CKd-H3, AAV CKd-H4, AAV CKd-H5, AAV CKd-H6, AAV CKd-N3, AAV CKd-N4. AAV CKd-N9, AAV CLg-F1. AAV CLg-F2, AAV CLg-F3, AAV CLg-F4, AAV CLg-F5, AAV CLg-F6, AAV CLg-F7, AAV CLg-F8, AAV CLv-1, AAV CLv-1, AAV Clv1-10, AAV CLv1-2, AAV CLv-12, AAV CLv1-3, AAV CLv-13, AAV CLv1-4, AAV Clv1-7, AAV Clv1-8, AAV Clv1-9, AAV CLv-2, AAV CLv-3, AAV CLv-4, AAV CLv-6, AAV CLv-8, AAV CLv-D1, AAV CLv-D2, AAV CLv-D3, AAV CLv-D4, AAV CLv-D5. AAV CLv-D6, AAV CLv-D7, AAV CLv-D8, AAV CLv-E1, AAV CLv-K1, AAV CLv-K3, AAV CLv-K6, AAV CLv-L4, AAV CLv-L5, AAV CLv-L6, AAV CLv-M1, AAV CLv-M11, AAV CLv-M2, AAV CLv-M5, AAV CLv-M6, AAV CLv-M7, AAV CLv-M8, AAV CLv-M9, AAV CLv-R1, AAV CLv-R2, AAV CLv-R3, AAV CLv-R4, AAV CLv-R5, AAV CLv-R6, AAV CLv-R7, AAV CLv-R8, AAV CLv-R9, AAV CSp-1, AAV CSp-10, AAV CSp-11, AAV CSp-2, AAV CSp-3, AAV CSp-4, AAV CSp-6, AAV CSp-7, AAV CSp-8, AAV CSp-8.10, AAV CSp-8.2. AAV CSp-8.4, AAV CSp-8.5, AAV CSp-8.6, AAV CSp-8.7, AAV CSp-8.8, AAV CSp-8.9, AAV CSp-9, AAV.hu.48R3, AAV.VR-355, AAV3B, AAV4, AAV5, AAVF1/HSC1, AAVF11/HSC11, AAVF12/HSC12, AAVF13/HSC13, AAVF14/HSC14, AAVF15/HSC15, AAVF16/HSC16, AAVF17/HSC17, AAVF2/HSC2, AAVF3/HSC3. AAVF4/HSC4, AAVF5/HSC5, AAVF6/HSC6, AAVF7/HSC7, AAVF8/HSC8, and/or AAVF9/HSC9 and variants thereof. In one aspect, the capsid of the AAV particle is VOY101. In one aspect, the capsid of the AAV particle is VOY201. In one aspect, the capsid of the AAV particle is VOY801. In one aspect, the capsid of the AAV particle is VOY1101. In one aspect, the AAV particle comprises a peptide insert and the peptide insert is AAVPHP.N. In one aspect, the AAV particle comprises a peptide insert and the peptide insert is AAVPHP.B. In one aspect, the AAV particle comprises a peptide insert and the peptide insert is AAVPHP.A. In one aspect, the AAV particle comprises a peptide insert and the peptide insert is AAVPHP.S.

[0010] In one aspect, the AAV particle comprises a viral genome which comprises a nucleic acid sequence position between two inverted terminal repeats (ITRs).

[0011] In one aspect, the capsid penetrates the blood brain barrier following delivery of the AAV particle. The delivery may be by any method known in the art, such as, but not limited to, intravenous administration or intracarotid artery delivery.

[0012] In one aspect, the viral genome transduces the peripheral nervous system (PNS) upon delivery of the AAV particle. The delivery may be by any method known in the art, such as, but not limited to, intravenous administration or intracarotid artery delivery.

[0013] The AAV particles of the present disclosure transduce CNS structures following administration. Non-limiting examples of CNS structures include brain, spinal cord, brainstem nuclei, cerebellum, cerebrum, motor cortex, caudate nucleus, thalamus, hypothalamus, cervical spinal cord, thoracic spinal cord, lumbar spinal cord, striatum, substantia nigra, hippocampus, amygdala and/or cerebral cortex.

[0014] In one aspect, AAV particles of the present disclosure transduce PNS structures following administration. Non-limiting examples of PNS structures include the sensory nervous system (e.g., dorsal root ganglia, trigeminal ganglia), the autonomous nervous system (e.g., parasympathetic and sympathetic ganglia), the enteric nervous system and nerve cell clusters in tissues and organs.

[0015] In one aspect, the AAV particle comprises a viral genome which comprises a nucleic acid sequence that, when expressed, inhibits or suppresses the expression of one or more genes of interest (e.g., superoxide dismutase 1 (SOD1), chromosome 9 open reading frame 72 (C90RF72), TAR DNA binding protein (TARDBP), ataxin 3 (ATXN3), huntingtin (HTT), amyloid precursor protein (APP), apolipoprotein E (APOE), microtubule-associated protein tau (MAPT), alpha synuclein (SNCA), voltage-gated sodium channel alpha subunit 9 (SCN9A) and voltage-gated sodium channel alpha subunit 10 (SCN10A)) in a cell. For each gene of interest, the nucleic acid sequence comprises a sense strand sequence and an antisense strand sequence which may be independently 30 nucleotides in length or less and, the sense and/or antisense strands may comprise a 3′ overhang of at least 1 or at least 2 nucleotides. For each gene of interest, the sense sequence and antisense strand sequence may share a region of complementarity of at least four nucleotides in length (e.g., at least 17 nucleotides in length, between 19 and 21 nucleotides in length, or 19 nucleotides in length). For each gene of interest, the antisense strand may be excised from the AAV particle at a rate of at least 80%, 85%, 90%, 95% or more than 95% or more than 98% or more than 99%. The antisense strand may be excised from the AAV particle at a rate greater than the excision of the sense strand (e.g., 2 times, 5 times, 10 times or more than 10 times greater).

[0016] In one embodiment, the nucleic acid when expressed inhibits or suppresses the expression of two genes in a cell. In one embodiment, the nucleic acid when expressed inhibits or suppresses the expression of three genes in a cell. In one embodiment, the nucleic acid when expressed inhibits or suppresses the expression of four genes in a cell. In one embodiment, the nucleic acid when expressed inhibits or suppresses the expression of five genes in a cell. In one embodiment, the nucleic acid when expressed inhibits or suppresses the expression of six genes in a cell. In one embodiment, the nucleic acid when expressed inhibits or suppresses the expression of seven genes in a cell. In one embodiment, the nucleic acid when expressed inhibits or suppresses the expression of eight genes in a cell. In one embodiment, the nucleic acid when expressed inhibits or suppresses the expression of nine genes in a cell.

[0017] In one aspect, the AAV particle comprises a viral genome which comprises a nucleic acid sequence that expresses a gene of interest (e.g., an antibody, Aromatic L-Amino Acid Decarboxylase (AADC), APOE2, Frataxin, survival motor neuron (SMN) protein, glucocerebrosidase (GCase), N-sulfoglucosamine sulfohydrolase, N-acetyl-alpha-glucosaminidase, iduronate 2-sulfatase, alpha-L-iduronidase, palmitoyl-protein thioesterase 1, tripeptidyl peptidase 1, battenin, CLN5, CLN6 (linclin), MFSD8, CLN8, aspartoacylase (ASPA), progranulin (GRN), MeCP2, beta-galactosidase (GLB1), and gigaxonin (GAN).

[0018] Provided herein are compositions (e.g., pharmaceutical compositions) and formulations comprising AAV particles. The AAV particles may comprise a viral genome comprising a nucleic acid sequence encoding a protein of interest (e.g., an antibody, AADC, APOE2, Frataxin, SMN, GCase, N-sulfoglucosamine sulfohydrolase, N-acetyl-alpha-glucosaminidase, iduronate 2-sulfatase, alpha-L-iduronidase, palmitoyl-protein thioesterase 1, tripeptidyl peptidase 1, battenin, CLN5, CLN6 (linclin), MFSD8, CLN8, ASPA, GRN, MeCP2, GLB1, and/or GAN. The AAV particles may comprise a viral genome comprising nucleic acid sequences that when expressed, inhibits or suppresses the expression of one or more genes of interest (e.g., SOD1, C90RF72, TARDBP, ATXN3, HTT, APP, APOE, MAPT, SNCA, SCN9A and/or SCN10A) in a cell. For example, the AAV particles may comprise a viral genome comprising nucleic acid sequences that when expressed, inhibits or suppresses the expression of two genes of interest in a cell. For example, the AAV particles may comprise a viral genome comprising nucleic acid sequences that when expressed, inhibits or suppresses the expression of three, four, five, six, seven, eight, or nine genes of interest in a cell

[0019] Provided herein are methods of using AAV particles.

[0020] In one aspect, provided are methods of inhibiting the expression of a target gene in a cell (e.g., mammalian cell, or mammalian cell of the CNS or PNS).

[0021] In one aspect, provided are methods of expressing, or increasing the expression of, a target gene in a cell (e.g., mammalian cell, or mammalian cell of the CNS or PNS).

[0022] In one aspect, provided are methods for treating and/or ameliorating a neurological disease in a subject by administering a therapeutically effective amount of a composition comprising the AAV particles described herein. The administration may be by intravenous or intracarotid artery delivery. The methods may be used to increase the expression of a protein of interest (e.g., an antibody, AADC, APOE2, Frataxin, SMN, GCase, N-sulfoglucosamine sulfohydrolase, N-acetyl-alpha-glucosaminidase, iduronate 2-sulfatase, alpha-L-iduronidase, palmitoyl-protein thioesterase 1, tripeptidyl peptidase 1, battenin, CLN5, CLN6 (linclin), MFSD8, CLN8, ASPA, GRN, McCP2, GLB1, and/or GAN. The methods may be used to decrease the amount of expression of a gene of interest (e.g., SOD1, C90RF72, TARDBP, ATXN3, HTT, APP, APOE, MAPT, SNCA, SCN9A and/or SCN10A).

[0023] In one aspect, provided are methods for altering the level of a protein or gene of interest by administration of the AAV particles described herein. The administration may be by intravenous or intracarotid artery delivery. The methods may be used to increase the expression of a protein of interest (e.g., an antibody, AADC, APOE2, Frataxin, SMN, GCase, N-sulfoglucosamine sulfohydrolase, N-acetyl-alpha-glucosaminidase, iduronate 2-sulfatase, alpha-L-iduronidase, palmitoyl-protein thioesterase 1, tripeptidyl peptidase 1, battenin, CLN5, CLN6 (linclin), MFSD8. CLN8, ASPA, GRN, MeCP2, GLB1, and/or GAN. The methods may be used to decrease the amount of expression of a gene of interest (e.g., SOD1, C90RF72, TARDBP, ATXN3, HTT, APP, APOE, MAPT, SNCA, SCN9A and/or SCN10A). The methods may be used to alter the level of the target protein or gene in the CNS and/or PNS.

### BRIEF DESCRIPTION OF THE DRAWINGS

[0024] The foregoing and other objects, features and advantages will be apparent from the following description of particular embodiments of the disclosure, as illustrated in the accompanying drawings. The drawings are not necessarily to scale, emphasis instead being placed upon illustrating the principles of various embodiments of the disclosure.

[0025] FIG. 1 is a schematic of a viral genome.

### DETAILED DESCRIPTION

[0026] The details of one or more embodiments of the disclosure are set forth in the accompanying description below. Although any materials and methods similar or equivalent to those described herein can be used in the practice or testing of the compositions of the present disclosure, the preferred materials and methods are now described. Other features, objects and advantages of the disclosure will be apparent from the description, drawings, and claims. In the description, the singular forms also include the plural unless the context clearly dictates otherwise. Unless defined otherwise, all technical and scientific terms used herein have the same meaning as commonly understood by one of ordinary skill in the art to which this disclosure belongs. In the case of conflict, the present description will control.

### I. COMPOSITIONS

### Adeno-Associated Viruses (AAVs) and AAV Particles

[0027] Viruses of the Parvoviridae family are small non-enveloped icosahedral capsid viruses characterized by a single stranded DNA genome. Parvoviridae family viruses consist of two subfamilies: Parvovirinae, which infect vertebrates, and Densovirinae, which infect invertebrates. Due to its relatively simple structure, easily manipulated using standard molecular biology techniques, this virus family is useful as a biological tool. The genome of the virus may be modified to contain a minimum of components for the assembly of a functional recombinant virus, or viral particle, which is loaded with or engineered to express or deliver a desired payload, which may be delivered to a target cell, tissue, organ, or organism.

[0028] The parvoviruses and other members of the Parvoviridae family are generally described in Kenneth I. Berns, “Parvoviridae: The Viruses and Their Replication,” Chapter 69 in FIELDS VIROLOGY (3d Ed. 1996), the contents of which are incorporated by reference in their entirety.

[0029] The Parvoviridae family comprises the Dependovirus genus which includes adeno-associated viruses (AAV) capable of replication in vertebrate hosts including, but not limited to, human, primate, bovine, canine, equine, and ovine species.

[0030] The AAV viral genome is a linear, single-stranded DNA (ssDNA) molecule approximately 5,000 nucleotides (nt) in length. The AAV viral genome can comprise a payload region and at least one inverted terminal repeat (ITR) or ITR region. ITRs traditionally flank the coding nucleotide sequences for the non-structural proteins (encoded by Rep genes) and the structural proteins (encoded by capsid genes or Cap genes). While not wishing to be bound by theory, an AAV viral genome typically comprises two ITR sequences. The AAV vector genome comprises a characteristic T-shaped hairpin structure defined by the self-complementary terminal 145 nt of the 5′ and 3′ ends of the ssDNA which form an energetically stable double stranded region. The double stranded hairpin structures comprise multiple functions including, but not limited to, acting as an origin for DNA replication by functioning as primers for the endogenous DNA polymerase complex of the host viral replication cell.

[0031] In addition to the encoded heterologous payload, AAV particles may comprise the viral genome, in whole or in part, of any naturally occurring and/or recombinant AAV serotype nucleotide sequence or variant. AAV variants may have sequences of significant homology at the nucleic acid (genome or capsid) and amino acid levels (capsids), to produce constructs which are generally physical and functional equivalents, replicate by similar mechanisms, and assemble by similar mechanisms. Chiorini et al., J. Vir. 71: 6823-33(1997); Srivastava et al., J. Vir. 45:555-64 (1983); Chiorini et al., J. Vir. 73:1309-1319 (1999); Rutledge et al., J. Vir. 72:309-319 (1998); and Wu et al., J. Vir. 74: 8635-47 (2000), the contents of each of which are incorporated herein by reference in their entirety.

[0032] In one embodiment, AAV particles of the present disclosure are recombinant AAV viral vectors which are replication defective, lacking sequences encoding functional Rep and Cap proteins within their viral genome. These defective AAV particles may lack most or all parental coding sequences and essentially carry only one or two AAV ITR sequences and the nucleic acid of interest for delivery to a cell, a tissue, an organ or an organism.

[0033] In one embodiment, the viral genome of the AAV particles of the present disclosure comprise at least one control element which provides for the replication, transcription and translation of a coding sequence encoded therein. Not all of the control elements need always be present as long as the coding sequence is capable of being replicated, transcribed and/or translated in an appropriate host cell. Non-limiting examples of expression control elements include sequences for transcription initiation and/or termination, promoter and/or enhancer sequences, efficient RNA processing signals such as splicing and polyadenylation signals, sequences that stabilize cytoplasmic mRNA, sequences that enhance translation efficacy (e.g., Kozak consensus sequence), sequences that enhance protein stability, and/or sequences that enhance protein processing and/or secretion.

[0034] According to the present disclosure, AAV particles for use in therapeutics and/or diagnostics comprise a virus that has been distilled or reduced to the minimum components necessary for transduction of a nucleic acid payload or cargo of interest. In this manner, AAV particles are engineered as vehicles for specific delivery while lacking the deleterious replication and/or integration features found in wild-type viruses.

[0035] AAV particles of the present disclosure may be produced recombinantly and may be based on adeno-associated virus (AAV) parent or reference sequences. As used herein, a “vector” is any molecule or moiety which transports, transduces or otherwise acts as a carrier of a heterologous molecule such as the nucleic acids described herein.

[0036] In addition to single stranded AAV viral genomes (e.g., ssAAVs), the present disclosure also provides for self-complementary AAV (scAAVs) viral genomes. scAAV vector genomes contain DNA strands which anneal together to form double stranded DNA. By skipping second strand synthesis, scAAVs allow for rapid expression in the cell.

[0037] In one embodiment, the AAV particle of the present disclosure is an scAAV.

[0038] In one embodiment, the AAV particle of the present disclosure is an ssAAV.

[0039] Methods for producing and/or modifying AAV particles are disclosed in the art such as pseudotyped AAV particles (PCT Patent Publication Nos. WO200028004; WO200123001; WO2004112727; WO2005005610 and WO2005072364, the contents of each of which are incorporated herein by reference in their entirety).

[0040] AAV particles may be modified to enhance the efficiency of delivery. Such modified AAV particles can be packaged efficiently and be used to successfully infect the target cells at high frequency and with minimal toxicity. In some embodiments the capsids of the AAV particles are engineered according to the methods described in U.S. Patent Application Publication NO. US 20130195801, the contents of which are incorporated herein by reference in their entirety.

[0041] In one embodiment, the AAV particles comprising a payload region encoding the polypeptides of the disclosure may be introduced into mammalian cells (e.g., human cells).

### AAV Serotypes

[0042] AAV particles of the present disclosure may comprise or be derived from any natural or recombinant AAV serotype. According to the present disclosure, the AAV particles may utilize or be based on a serotype or include a peptide selected from any of the following VOY101, VOY201, VOY801, VOY1101, AAVPHP.B (PHP.B), AAVPHP.A (PHP.A), AAVG2B-26, AAVG2B-13, AAVTH1.1-32, AAVTH1.1-35, AAVPHP.B2 (PHP.B2), AAVPHP.B3 (PHP.B3), AAVPHP.N/PHP.B-DGT, AAVPHP.B-EST, AAVPHP.B-GGT, AAVPHP.B-ATP, AAVPHP.B-ATT-T, AAVPHP.B-DGT-T, AAVPHP.B-GGT-T, AAVPHP.B-SGS, AAVPHP.B-AQP, AAVPHP.B-QQP, AAVPHP.B-SNP(3), AAVPHP.B-SNP, AAVPHP.B-QGT, AAVPHP.B-NQT, AAVPHP.B-EGS, AAVPHP.B-SGN, AAVPHP.B-EGT, AAVPHP.B-DST, AAVPHP.B-DST, AAVPHP.B-STP, AAVPHP.B-PQP, AAVPHP.B-SQP, AAVPHP.B-QLP, AAVPHP.B-TMP, AAVPHP.B-TP, AAVPHP.S/G2A12, AAVG2A15/G2A3 (G2A3), AAVG2B4 (G2B4), AAVG2B5 (G2B5), PHP.S, AAV1, AAV2, AAV2G9, AAV3, AAV3a, AAV3b, AAV3-3, AAV4, AAV4-4, AAV5, AAV6, AAV6.1, AAV6.2, AAV6.1.2, AAV7, AAV7.2, AAV8, AAV9, AAV9.11, AAV9.13, AAV9.16, AAV9.24, AAV9.45, AAV9.47, AAV9.61, AAV9.68, AAV9.84, AAV9.9, AAV10, AAV11, AAV12, AAV16.3, AAV24.1, AAV27.3, AAV42.12, AAV42-1b, AAV42-2, AAV42-3a, AAV42-3b, AAV42-4, AAV42-5a, AAV42-5b, AAV42-6b, AAV42-8, AAV42-10, AAV42-11, AAV42-12, AAV42-13, AAV42-15, AAV42-aa, AAV43-1, AAV43-12, AAV43-20, AAV43-21, AAV43-23, AAV43-25, AAV43-5, AAV44.1, AAV44.2, AAV44.5, AAV223.1, AAV223.2, AAV223.4, AAV223.5, AAV223.6, AAV223.7, AAV1-7/rh.48, AAV-8/rh.49, AAV2-15/rh.62, AAV2-3/rh.61, AAV2-4/rh.50, AAV2-5/rh.51, AAV3.1/hu.6, AAV3.1/hu.9, AAV3-9/rh.52, AAV3-11/rh.53, AAV4-8/r11.64, AAV4-9/rh.54, AAV4-19/rh.55, AAV5-3/rh.57, AAV5-22/rh.58, AAV7.3/hu.7, AAV16.8/hu.10, AAV16.12/hu.11, AAV29.3/bb.1, AAV29.5/bb.2, AAV106.1/hu.37, AAV114.3/hu.40, AAV127.2/hu.41, AAV127.5/hu.42, AAV128.3/hu.44, AAV130.4/hu.48, AAV145.1/hu.53, AAV145.5/hu.54, AAV145.6/hu.55, AAV161.10/hu.60, AAV161.6/hu.61, AAV33.12/hu.17, AAV33.4/hu.15, AAV33.8/hu.16, AAV52/hu.19, AAV52.1/hu.20, AAV58.2/hu.25, AAVA3.3, AAVA3.4, AAVA3.5, AAVA3.7, AAVC1, AAVC2, AAVC5, AAV-DJ, AAV-DJ8, AAVF3, AAVF5, AAVH2. AAVrh.72, AAVhu.8, AAVrh.68, AAVrh.70, AAVpi.1. AAVpi.3, AAVpi.2, AAVrh.60, AAVrh.44, AAVrh.65, AAVrh.55, AAVrh.47, AAVrh.69, AAVrh.45, AAVrh.59, AAVhu.12, AAVH6, AAVLK03, AAVH-1/hu.1, AAVH-5/hu.3, AAVLG-10/rh.40, AAVLG-4/rh.38, AAVLG-9/hu.39, AAVN721-8/rh.43, AAVCh.5, AAVCh.5R1, AAVcy.2, AAVcy.3, AAVcy.4, AAVcy.5, AAVCy.5R1, AAVCy.5R2, AAVCy.5R3, AAVCy.5R4, AAVcy.6, AAVhu.1, AAVhu.2, AAVhu.3, AAVhu.4, AAVhu.5, AAVhu.6, AAVhu.7, AAVhu.9. AAVhu.10, AAVhu.11, AAVhu.13, AAVhu.15, AAVhu.16, AAVhu.17, AAVhu.18, AAVhu.20, AAVhu.21, AAVhu.22, AAVhu.23.2, AAVhu.24, AAVhu.25, AAVhu.27, AAVhu.28, AAVhu.29, AAVhu.29R, AAVhu.31, AAVhu.32, AAVhu.34, AAVhu.35, AAVhu.37, AAVhu.39, AAVhu.40, AAVhu.41, AAVhu.42, AAVhu.43, AAVhu.44, AAVhu.44R1, AAVhu.44R2, AAVhu.44R3, AAVhu.45, AAVhu.46, AAVhu.47, AAVhu.48, AAVhu.48R1, AAVhu.48R2, AAVhu.48R3, AAVhu.49, AAVhu.51, AAVhu.52, AAVhu.54, AAVhu.55, AAVhu.56, AAVhu.57, AAVhu.58, AAVhu.60. AAVhu.61, AAVhu.63, AAVhu.64, AAVhu.66, AAVhu.67, AAVhu.14/9, AAVhu.t 19, AAVrh.2, AAVrh.2R, AAVrh.8, AAVrh.8R, AAVrh.10, AAVrh.12, AAVrh.13, AAVrh.13R, AAVrh.14, AAVrh.17. AAVrh.18, AAVrh.19, AAVrh.20, AAVrh.21, AAVrh.22, AAVrh.23. AAVrh.24, AAVrh.25, AAVrh.31, AAVrh.32, AAVrh.33, AAVrh.34, AAVrh.35, AAVrh.36, AAVrh.37, AAVrh.37R2, AAVrh.38, AAVrh.39, AAVrh.40, AAVrh.46, AAVrh.48, AAVrh.48.1. AAVrh.48.1.2, AAVrh.48.2, AAVrh.49, AAVrh.51, AAVrh.52, AAVrh.53. AAVrh.54, AAVrh.56, AAVrh.57, AAVrh.58, AAVrh.61, AAVrh.64, AAVrh.64R1, AAVrh.64R2, AAVrh.67, AAVrh.73, AAVrh.74, AAVrh8R, AAVrh8R A586R mutant, AAVrh8R R533A mutant, AAAV, BAAV, caprine AAV, bovine AAV, AAVhE1.1. AAVhEr1.5, AAVhER1.14, AAVhEr1.8, AAVhEr1.16, AAVhEr1.18, AAVhEr1.35, AAVhEr1.7, AAVhEr1.36, AAVhEr2.29, AAVhEr2.4, AAVhEr2.16, AAVhEr2.30, AAVhEr2.31, AAVhEr2.36, AAVhER1.23, AAVhEr3.1, AAV2.5T, AAV-PAEC, AAV-LK01, AAV-LK02, AAV-LK03, AAV-LK04, AAV-LK05, AAV-LK06, AAV-LK07, AAV-LK08, AAV-LK09, AAV-LK10, AAV-LK11, AAV-LK12, AAV-LK13, AAV-LK14, AAV-LK15, AAV-LK16, AAV-LK17, AAV-LK18, AAV-LK19, AAV-PAEC2, AAV-PAEC4, AAV-PAEC6, AAV-PAEC7, AAV-PAEC8, AAV-PAEC11, AAV-PAEC12, AAV-2-pre-miRNA-101, AAV-8h, AAV-8b, AAV-h, AAV-b, AAV SM 10-2. AAV Shuffle 100-1, AAV Shuffle 100-3, AAV Shuffle 100-7, AAV Shuffle 10-2, AAV Shuffle 10-6, AAV Shuffle 10-8, AAV Shuffle 100-2, AAV SM 10-1, AAV SM 10-8, AAV SM 100-3, AAV SM 100-10, BNP61 AAV. BNP62 AAV, BNP63 AAV. AAVrh.50, AAVrh.43, AAVrh.62, AAVrh.48, AAVhu.19. AAVhu.11. AAVhu.53, AAV4-8/rh.64, AAVLG-9/hu.39, AAV54.5/hu.23, AAV54.2/hu.22, AAV54.7/hu.24, AAV54.1/hu.21, AAV54.4R/hu.27, AAV46.2/hu.28, AAV46.6/hu.29, AAV128.1/hu.43, true type AAV (ttAAV), UPENN AAV 10, Japanese AAV10 serotypes, AAV CBr-7.1, AAV CBr-7.10, AAV CBr-7.2, AAV CBr-7.3, AAV CBr-7.4, AAV CBr-7.5, AAV CBr-7.7, AAV CBr-7.8, AAV CBr-B7.3, AAV CBr-B7.4, AAV CBr-E1, AAV CBr-E2, AAV CBr-E3, AAV CBr-E4, AAV CBr-E5, AAV CBr-e5, AAV CBr-E6, AAV CBr-E7, AAV CBr-E8, AAV CHt-1, AAV CHt-2, AAV CHt-3, AAV CHt-6.1, AAV CHt-6.10, AAV CHt-6.5, AAV CHt-6.6, AAV CHt-6.7, AAV CHt-6.8, AAV CHt-P1, AAV CHt-P2, AAV CHt-P5, AAV CHt-P6, AAV CHt-P8, AAV CHt-P9, AAV CKd-1, AAV CKd-10, AAV CKd-2, AAV CKd-3. AAV CKd-4, AAV CKd-6, AAV CKd-7, AAV CKd-8, AAV CKd-B1, AAV CKd-B2, AAV CKd-B3, AAV CKd-B4, AAV CKd-B5, AAV CKd-B6, AAV CKd-B7, AAV CKd-18, AAV CKd-H1, AAV CKd-H2, AAV CKd-H3, AAV CKd-H4, AAV CKd-H5, AAV CKd-H6, AAV CKd-N3, AAV CKd-N4, AAV CKd-N9, AAV CLg-F1, AAV CLg-F2, AAV CLg-F3, AAV CLg-F4, AAV CLg-F5, AAV CLg-F6, AAV CLg-F7, AAV CLg-F8, AAV CLv-1, AAV CLv1-1, AAV Clv1-10, AAV CLv1-2, AAV CLv-12, AAV CLv1-3, AAV CLv-13, AAV CLv1-4, AAV Clv1-7, AAV Clv1-8, AAV Clv1-9, AAV CLv-2, AAV CLv-3, AAV CLv-4, AAV CLv-6, AAV CLv-8, AAV CLv-D1, AAV CLv-D2, AAV CLv-D3, AAV CLv-D4, AAV CLv-D5, AAV CLv-D6, AAV CLv-D7, AAV CLv-D8, AAV CLv-E1, AAV CLv-K1, AAV CLv-K3, AAV CLv-K6, AAV CLv-L4, AAV CLv-L5, AAV CLv-L6, AAV CLv-M1, AAV CLv-M11, AAV CLv-M2, AAV CLv-M5, AAV CLv-M6, AAV CLv-M7, AAV CLv-M8, AAV CLv-M9, AAV CLv-R1, AAV CLv-R2, AAV CLv-R3, AAV CLv-R4, AAV CLv-R5, AAV CLv-R6, AAV CLv-R7, AAV CLv-R8, AAV CLv-R9, AAV CSp-1, AAV CSp-10, AAV CSp-11, AAV CSp-2, AAV CSp-3, AAV CSp-4, AAV CSp-6, AAV CSp-7, AAV CSp-8, AAV CSp-8.10, AAV CSp-8.2, AAV CSp-8.4, AAV CSp-8.5, AAV CSp-8.6, AAV CSp-8.7, AAV CSp-8.8, AAV CSp-8.9, AAV CSp-9, AAV.hu.48R3, AAV.VR-355, AAV3B, AAV4, AAV5, AAVF1/HSC1, AAVF11/HSC11, AAVF12/HSC12, AAVF13/HSC13, AAVF14/HSC14, AAVF15/HSC15, AAVF16/HSC16, AAVF17/HSC17, AAVF2/HSC2, AAVF3/HSC3, AAVF4/HSC4, AAVF5/HSC5, AAVF6/HSC6, AAVF7/HSC7, AAVF8/HSC8, and/or AAVF9/HSC9 and variants thereof.

[0043] In some embodiments, the AAV serotype may be, or have, a sequence as described in U.S. Patent Application Publication No. US20030138772, the contents of which are herein incorporated by reference in their entirety, such as, but not limited to, AAV1 (SEQ ID NO: 6 and 64 of US20030138772), AAV2 (SEQ ID NO: 7 and 70 of US20030138772), AAV3 (SEQ ID NO: 8 and 71 of US20030138772), AAV4 (SEQ ID NO: 63 of US20030138772), AAV5 (SEQ ID NO: 114 of US20030138772), AAV6 (SEQ ID NO: 65 of US20030138772), AAV7 (SEQ ID NO: 1-3 of US20030138772), AAV8 (SEQ ID NO: 4 and 95 of US20030138772), AAV9 (SEQ ID NO: 5 and 100 of US20030138772). AAV10 (SEQ ID NO: 117 of US20030138772), AAV11 (SEQ ID NO: 118 of US20030138772), AAV12 (SEQ ID NO: 119 of US20030138772), AAVrh10 (amino acids 1 to 738 of SEQ ID NO: 81 of US20030138772), AAV16.3 (US20030138772 SEQ ID NO: 10), AAV29.3/bb.1 (US20030138772 SEQ ID NO: 11), AAV29.4 (US20030138772 SEQ ID NO: 12), AAV29.5/bb.2 (US20030138772 SEQ ID NO: 13), AAV1.3 (US20030138772 SEQ ID NO: 14), AAV13.3 (US20030138772 SEQ ID NO: 15), AAV24.1 (US20030138772 SEQ ID NO: 16), AAV27.3 (US20030138772 SEQ ID NO: 17), AAV7.2 (US20030138772 SEQ ID NO: 18), AAVC1 (US20030138772 SEQ ID NO: 19), AAVC3 (US20030138772 SEQ ID NO: 20), AAVC5 (US20030138772 SEQ ID NO: 21), AAVF1 (US20030138772 SEQ ID NO: 22), AAVF3 (US20030138772 SEQ ID NO: 23), AAVF5 (US20030138772 SEQ ID NO: 24), AAVH6 (US20030138772 SEQ ID NO: 25), AAVH2 (US20030138772 SEQ ID NO: 26), AAV42-8 (US20030138772 SEQ ID NO: 27), AAV42-15 (US20030138772 SEQ ID NO: 28), AAV42-5b (US20030138772 SEQ ID NO: 29), AAV42-1b (US20030138772 SEQ ID NO: 30), AAV42-13 (US20030138772 SEQ ID NO: 31), AAV42-3a (US20030138772 SEQ ID NO: 32), AAV42-4 (US20030138772 SEQ ID NO: 33), AAV42-5a (US20030138772 SEQ ID NO: 34), AAV42-10 (US20030138772 SEQ ID NO: 35), AAV42-3b (US20030138772 SEQ ID NO: 36), AAV42-11 (US20030138772 SEQ ID NO: 37). AAV42-6b (US20030138772 SEQ ID NO: 38), AAV43-1 (US20030138772 SEQ ID NO: 39), AAV43-5 (US20030138772 SEQ ID NO: 40), AAV43-12 (US20030138772 SEQ ID NO: 41), AAV43-20 (US20030138772 SEQ ID NO: 42), AAV43-21 (US20030138772 SEQ ID NO: 43), AAV43-23 (US20030138772 SEQ ID NO: 44), AAV43-25 (US20030138772 SEQ ID NO: 45), AAV44.1 (US20030138772 SEQ ID NO: 46), AAV44.5 (US20030138772 SEQ ID NO: 47), AAV223.1 (US20030138772 SEQ ID NO: 48), AAV223.2 (US20030138772 SEQ ID NO: 49), AAV223.4 (US20030138772 SEQ ID NO: 50), AAV223.5 (US20030138772 SEQ ID NO: 51), AAV223.6 (US20030138772 SEQ ID NO: 52), AAV223.7 (US20030138772 SEQ ID NO: 53), AAVA3.4 (US20030138772 SEQ ID NO: 54), AAVA3.5 (US20030138772 SEQ ID NO: 55), AAVA3.7 (US20030138772 SEQ ID NO: 56), AAVA3.3 (US20030138772 SEQ ID NO: 57), AAV42.12 (US20030138772 SEQ ID NO: 58), AAV44.2 (US20030138772 SEQ ID NO: 59), AAV42-2 (US20030138772 SEQ ID NO: 9), or variants thereof.

[0044] In some embodiments, the AAV serotype may be, or have, a sequence as described in U.S. Patent Application Publication No. US20150159173, the contents of which are herein incorporated by reference in their entirety, such as, but not limited to, AAV2 (SEQ ID NO: 7 and 23 of US20150159173), rh20 (SEQ ID NO: 1 of US20150159173), rh32/33 (SEQ ID NO: 2 of US20150159173), rh39 (SEQ ID NO: 3, 20 and 36 of US20150159173), rh46 (SEQ ID NO: 4 and 22 of US20150159173), rh73 (SEQ ID NO: 5 of US20150159173), rh74 (SEQ ID NO: 6 of US20150159173), AAV6.1 (SEQ ID NO: 29 of US20150159173), rh.8 (SEQ ID NO: 41 of US20150159173), rh.48.1 (SEQ ID NO: 44 of US20150159173), hu.44 (SEQ ID NO: 45 of US20150159173), hu.29 (SEQ ID NO: 42 of US20150159173), hu.48 (SEQ ID NO: 38 of US20150159173), rh54 (SEQ ID NO: 49 of US20150159173), AAV2 (SEQ ID NO: 7 of US20150159173), cy.5 (SEQ ID NO: 8 and 24 of US20150159173), rh.10 (SEQ ID NO: 9 and 25 of US20150159173), rh.13 (SEQ ID NO: 10 and 26 of US20150159173), AAV1 (SEQ ID NO: 11 and 27 of US20150159173), AAV3 (SEQ ID NO: 12 and 28 of US20150159173), AAV6 (SEQ ID NO: 13 and 29 of US20150159173), AAV7 (SEQ ID NO: 14 and 30 of US20150159173), AAV8 (SEQ ID NO: 15 and 31 of US20150159173), hu.13 (SEQ ID NO: 16 and 32 of US20150159173), hu.26 (SEQ ID NO: 17 and 33 of US20150159173), hu.37 (SEQ ID NO: 18 and 34 of US20150159173), hu.53 (SEQ ID NO: 19 and 35 of US20150159173), rh.43 (SEQ ID NO: 21 and 37 of US20150159173), rh2 (SEQ ID NO: 39 of US20150159173), rh.37 (SEQ ID NO: 40 of US20150159173), rh.64 (SEQ ID NO: 43 of US20150159173), rh.48 (SEQ ID NO: 44 of US20150159173), ch.5 (SEQ ID NO 46 of US20150159173), rh.67 (SEQ ID NO: 47 of US20150159173), rh.58 (SEQ ID NO: 48 of US20150159173), or variants thereof including, but not limited to Cy5R1, Cy5R2, Cy5R3, Cy5R4, rh.13R, rh.37R2, rh.2R, rh.8R, rh.48.1, rh.48.2, rh.48.1.2, hu.44R1, hu.44R2, hu.44R3, hu.29R, ch.5R1, rh64R1, rh64R2, AAV6.2, AAV6.1, AAV6.12, hu.48R1, hu.48R2, and hu.48R3.

[0045] In some embodiments, the AAV serotype may be, or have, a sequence as described in U.S. Pat. No. 7,198,951, the contents of which are herein incorporated by reference in their entirety, such as, but not limited to, AAV9 (SEQ ID NO: 1-3 of U.S. Pat. No. 7,198,951). AAV2 (SEQ ID NO: 4 of U.S. Pat. No. 7,198,951), AAV1 (SEQ ID NO: 5 of U.S. Pat. No. 7,198,951), AAV3 (SEQ ID NO: 6 of U.S. Pat. No. 7,198,951), and AAV8 (SEQ ID NO: 7 of U.S. Pat. No. 7,198,951).

[0046] In some embodiments, the AAV serotype may be, or have, a mutation in the AAV9 sequence as described by N Pulicherla et al. (Molecular Therapy 19(6):1070-1078 (2011), the contents of which are herein incorporated by reference in their entirety), such as but not limited to, AAV9.9, AAV9.11, AAV9.13, AAV9.16, AAV9.24, AAV9.45, AAV9.47, AAV9.61, AAV9.68, AAV9.84.

[0047] In some embodiments, the AAV serotype may be, or have, a sequence as described in U.S. Pat. No. 6,156,303, the contents of which are herein incorporated by reference in their entirety, such as, but not limited to, AAV3B (SEQ ID NO: 1 and 10 of U.S. Pat. No. 6,156,303), AAV6 (SEQ ID NO: 2, 7 and 11 of U.S. Pat. No. 6,156,303), AAV2 (SEQ ID NO: 3 and 8 of U.S. Pat. No. 6,156,303), AAV3A (SEQ ID NO: 4 and 9, of U.S. Pat. No. 6,156,303), or derivatives thereof.

[0048] In some embodiments, the AAV serotype may be, or have, a sequence as described in U.S. Patent Application Publication No. US20140359799, the contents of which are herein incorporated by reference in their entirety, such as, but not limited to, AAV8 (SEQ ID NO: 1 of US20140359799), AAVDJ (SEQ ID NO: 2 and 3 of US20140359799), or variants thereof.

[0049] In some embodiments, the serotype may be AAVDJ or a variant thereof, such as AAVDJ8 (or AAV-DJ8), as described by Grimm et al. (Journal of Virology 82(12): 5887-5911 (2008), herein incorporated by reference in its entirety). The amino acid sequence of AAVDJ8 may comprise two or more mutations in order to remove the heparin binding domain (HBD). As a non-limiting example, the AAV-DJ sequence described as SEQ ID NO: 1 in U.S. Pat. No. 7,588,772, the contents of which are herein incorporated by reference in their entirety, may comprise two mutations: (1) R587Q where arginine (R; Arg) at amino acid 587 is changed to glutamine (Q; Gin) and (2) R590T where arginine (R; Arg) at amino acid 590 is changed to threonine (T; Thr). As another non-limiting example, may comprise three mutations: (1) K406R where lysine (K; Lys) at amino acid 406 is changed to arginine (R; Arg), (2) R587Q where arginine (R; Arg) at amino acid 587 is changed to glutamine (Q; Gin) and (3) R590T where arginine (R; Arg) at amino acid 590 is changed to threonine (T; Thr).

[0050] In some embodiments, the AAV serotype may be, or have, a sequence of AAV4 as described in International Publication No. WO1998011244, the contents of which are herein incorporated by reference in their entirety, such as, but not limited to AAV4 (SEQ ID NO: 1-20 of WO1998011244).

[0051] In some embodiments, the AAV serotype may be, or have, a mutation in the AAV2 sequence to generate AAV2G9 as described in International Publication No. WO2014144229 and herein incorporated by reference in its entirety.

[0052] In some embodiments, the AAV serotype may be, or have, a sequence as described in International Publication No. WO2005033321, the contents of which are herein incorporated by reference in their entirety, such as, but not limited to AAV3-3 (SEQ ID NO: 217 of WO2005033321), AAV1 (SEQ ID NO: 219 and 202 of WO2005033321), AAV106.1/hu.37 (SEQ ID No: 10 of WO2005033321), AAV114.3/hu.40 (SEQ ID No: 11 of WO2005033321), AAV127.2/hu.41 (SEQ ID NO:6 and 8 of WO2005033321), AAV128.3/hu.44 (SEQ ID No: 81 of WO2005033321), AAV130.4/hu.48 (SEQ ID NO: 78 of WO2005033321). AAV145.1/hu.53 (SEQ ID No: 176 and 177 of WO2005033321), AAV145.6/hu.56 (SEQ ID NO: 168 and 192 of WO2005033321), AAV16.12/hu.11 (SEQ ID NO: 153 and 57 of WO2005033321). AAV16.8/hu.10 (SEQ ID NO: 156 and 56 of WO2005033321), AAV161.10/hu.60 (SEQ ID No: 170 of WO2005033321), AAV161.6/hu.61 (SEQ ID No: 174 of WO2005033321), AAV1-7/rh.48 (SEQ ID NO: 32 of WO2005033321). AAV1-8/rh.49 (SEQ ID NOs: 103 and 25 of WO2005033321). AAV2 (SEQ ID NO: 211 and 221 of WO2005033321), AAV2-15/rh.62 (SEQ ID No: 33 and 114 of WO2005033321). AAV2-3/rh.61 (SEQ ID NO: 21 of WO2005033321), AAV2-4/rh.50 (SEQ ID No: 23 and 108 of WO2005033321), AAV2-5/rh.51 (SEQ ID NO: 104 and 22 of WO2005033321), AAV3.1/hu.6 (SEQ ID NO: 5 and 84 of WO2005033321), AAV3.1/hu.9 (SEQ ID NO: 155 and 58 of WO2005033321), AAV3-11/rh.53 (SEQ ID NO: 186 and 176 of WO2005033321), AAV3-3 (SEQ ID NO: 200 of WO2005033321), AAV33.12/hu.17 (SEQ ID NO:4 of WO2005033321). AAV33.4/hu.15 (SEQ ID No: 50 of WO2005033321). AAV33.8/hu.16 (SEQ ID No: 51 of WO2005033321), AAV3-9/rh.52 (SEQ ID NO: 96 and 18 of WO2005033321), AAV4-19/rh.55 (SEQ ID NO: 117 of WO2005033321), AAV4-4 (SEQ ID NO: 201 and 218 of WO2005033321), AAV4-9/rh.54 (SEQ ID NO: 116 of WO2005033321), AAV5 (SEQ ID NO: 199 and 216 of WO2005033321). AAV52.1/hu.20 (SEQ ID NO: 63 of WO2005033321), AAV52/hu.19 (SEQ ID NO: 133 of WO2005033321), AAV5-22/rh.58 (SEQ ID No: 27 of WO2005033321), AAV5-3/rh.57 (SEQ ID NO: 105 of WO2005033321), AAV5-3/rh.57 (SEQ ID No: 26 of WO2005033321), AAV58.2/hu.25 (SEQ ID No: 49 of WO2005033321). AAV6 (SEQ ID NO: 203 and 220 of WO2005033321), AAV7 (SEQ ID NO: 222 and 213 of WO2005033321), AAV7.3/hu.7 (SEQ ID No: 55 of WO2005033321), AAV8 (SEQ ID NO: 223 and 214 of WO2005033321), AAVH-1/hu.1 (SEQ ID No: 46 of WO2005033321), AAVH-5/hu.3 (SEQ ID No: 44 of WO2005033321), AAVhu.1 (SEQ ID NO: 144 of WO2005033321), AAVhu.10 (SEQ ID NO: 156 of WO2005033321), AAVhu.11 (SEQ ID NO: 153 of WO2005033321), AAVhu.12 (WO2005033321 SEQ ID NO: 59), AAVhu.13 (SEQ ID NO: 129 of WO2005033321), AAVhu.14/AAV9 (SEQ ID NO: 123 and 3 of WO2005033321), AAVhu.15 (SEQ ID NO: 147 of WO2005033321), AAVhu.16 (SEQ ID NO: 148 of WO2005033321), AAVhu.17 (SEQ ID NO: 83 of WO2005033321), AAVhu.18 (SEQ ID NO: 149 of WO2005033321), AAVhu.19 (SEQ ID NO: 133 of WO2005033321), AAVhu.2 (SEQ ID NO: 143 of WO2005033321), AAVhu.20 (SEQ ID NO: 134 of WO2005033321), AAVhu.21 (SEQ ID NO: 135 of WO2005033321). AAVhu.22 (SEQ ID NO: 138 of WO2005033321), AAVhu.23.2 (SEQ ID NO: 137 of WO2005033321), AAVhu.24 (SEQ ID NO: 136 of WO2005033321). AAVhu.25 (SEQ ID NO: 146 of WO2005033321), AAVhu.27 (SEQ ID NO: 140 of WO2005033321), AAVhu.29 (SEQ ID NO: 132 of WO2005033321). AAVhu.3 (SEQ ID NO: 145 of WO2005033321), AAVhu.31 (SEQ ID NO: 121 of WO2005033321), AAVhu.32 (SEQ ID NO: 122 of WO2005033321), AAVhu.34 (SEQ ID NO: 125 of WO2005033321), AAVhu.35 (SEQ ID NO: 164 of WO2005033321), AAVhu.37 (SEQ ID NO: 88 of WO2005033321), AAVhu.39 (SEQ ID NO: 102 of WO2005033321), AAVhu.4 (SEQ ID NO: 141 of WO2005033321). AAVhu.40 (SEQ ID NO: 87 of WO2005033321), AAVhu.41 (SEQ ID NO: 91 of WO2005033321). AAVhu.42 (SEQ ID NO: 85 of WO2005033321), AAVhu.43 (SEQ ID NO: 160 of WO2005033321), AAVhu.44 (SEQ ID NO: 144 of WO2005033321). AAVhu.45 (SEQ ID NO: 127 of WO2005033321), AAVhu.46 (SEQ ID NO: 159 of WO2005033321), AAVhu.47 (SEQ ID NO: 128 of WO2005033321), AAVhu.48 (SEQ ID NO: 157 of WO2005033321), AAVhu.49 (SEQ ID NO: 189 of WO2005033321). AAVhu.51 (SEQ ID NO: 190 of WO2005033321), AAVhu.52 (SEQ ID NO: 191 of WO2005033321), AAVhu.53 (SEQ ID NO: 186 of WO2005033321). AAVhu.54 (SEQ ID NO: 188 of WO2005033321), AAVhu.55 (SEQ ID NO: 187 of WO2005033321), AAVhu.56 (SEQ ID NO: 192 of WO2005033321), AAVhu.57 (SEQ ID NO: 193 of WO2005033321), AAVhu.58 (SEQ ID NO: 194 of WO2005033321), AAVhu.6 (SEQ ID NO: 84 of WO2005033321). AAVhu.60 (SEQ ID NO: 184 of WO2005033321), AAVhu.61 (SEQ ID NO: 185 of WO2005033321), AAVhu.63 (SEQ ID NO: 195 of WO2005033321), AAVhu.64 (SEQ ID NO: 196 of WO2005033321), AAVhu.66 (SEQ ID NO: 197 of WO2005033321). AAVhu.67 (SEQ ID NO: 198 of WO2005033321), AAVhu.7 (SEQ ID NO: 150 of WO2005033321), AAVhu.8 (WO2005033321 SEQ ID NO: 12), AAVhu.9 (SEQ ID NO: 155 of WO2005033321), AAVLG-10/rh.40 (SEQ ID No: 14 of WO2005033321), AAVLG-4/rh.38 (SEQ ID NO: 86 of WO2005033321), AAVLG-4/rh.38 (SEQ ID No: 7 of WO2005033321), AAVN721-8/rh.43 (SEQ ID NO: 163 of WO2005033321), AAVN721-8/rh.43 (SEQ ID No: 43 of WO2005033321), AAVpi.1 (WO2005033321 SEQ ID NO: 28), AAVpi.2 (WO2005033321 SEQ ID NO: 30), AAVpi.3 (WO2005033321 SEQ ID NO: 29) AAVrh.38 (SEQ ID NO: 86 of WO2005033321). AAVrh.40 (SEQ ID NO: 92 of WO2005033321), AAVrh.43 (SEQ ID NO: 163 of WO2005033321), AAVrh.44 (WO2005033321 SEQ ID NO: 34), AAVrh.45 (WO2005033321 SEQ ID NO: 41), AAVrh.47 (WO2005033321 SEQ ID NO: 38), AAVrh.48 (SEQ ID NO: 115 of WO2005033321), AAVrh.49 (SEQ ID NO: 103 of WO2005033321), AAVrh.50 (SEQ ID NO: 108 of WO2005033321). AAVrh.51 (SEQ ID NO: 104 of WO2005033321), AAVrh.52 (SEQ ID NO: 96 of WO2005033321), AAVrh.53 (SEQ ID NO: 97 of WO2005033321), AAVrh.55 (WO2005033321 SEQ ID NO: 37), AAVrh.56 (SEQ ID NO: 152 of WO2005033321). AAVrh.57 (SEQ ID NO: 105 of WO2005033321), AAVrh.58 (SEQ ID NO: 106 of WO2005033321). AAVrh.59 (WO2005033321 SEQ ID NO: 42), AAVrh.60 (WO2005033321 SEQ ID NO: 31), AAVrh.61 (SEQ ID NO: 107 of WO2005033321), AAVrh.62 (SEQ ID NO: 114 of WO2005033321), AAVrh.64 (SEQ ID NO: 99 of WO2005033321). AAVrh.65 (WO2005033321 SEQ ID NO: 35), AAVrh.68 (WO2005033321 SEQ ID NO: 16). AAVrh.69 (WO2005033321 SEQ ID NO: 39), AAVrh.70 (WO2005033321 SEQ ID NO: 20), AAVrh.72 (WO2005033321 SEQ ID NO: 9), or variants thereof including, but not limited to, AAVcy.2, AAVcy.3, AAVcy.4, AAVcy.5, AAVcy.6, AAVrh.12, AAVrh.17. AAVrh.18. AAVrh.19, AAVrh.21, AAVrh.22, AAVrh.23, AAVrh.24, AAVrh.25, AAVrh.25/42 15, AAVrh.31, AAVrh.32, AAVrh.33. AAVrh.34, AAVrh.35, AAVrh.36, AAVrh.37, AAVrh14. Non limiting examples of variants include SEQ ID NO: 13, 15, 17, 19, 24, 36, 40, 45, 47, 48, 51-54, 60-62, 64-77, 79, 80, 82, 89, 90, 93-95, 98, 100, 101, 109-113, 118-120, 124, 126, 131, 139, 142, 151, 154, 158, 161, 162, 165-183, 202, 204-212, 215, 219, 224-236, of WO2005033321, the contents of which are herein incorporated by reference in their entirety.

[0053] In some embodiments, the AAV serotype may be, or have, a sequence as described in International Publication No. WO2015168666, the contents of which are herein incorporated by reference in their entirety, such as, but not limited to, AAVrh8R (SEQ ID NO: 9 of WO2015168666), AAVrh8R A586R mutant (SEQ ID NO: 10 of WO2015168666), AAVrh8R R533A mutant (SEQ ID NO: 11 of WO2015168666), or variants thereof.

[0054] In some embodiments, the AAV serotype may be, or have, a sequence as described in U.S. Pat. No. 9,233,131, the contents of which are herein incorporated by reference in their entirety, such as, but not limited to, AAVhE1.1 (SEQ ID NO:44 of U.S. Pat. No. 9,233,131), AAVhEr1.5 (SEQ ID NO:45 of U.S. Pat. No. 9,233,131), AAVhER1.14 (SEQ ID NO:46 of U.S. Pat. No. 9,233,131), AAVhEr1.8 (SEQ ID NO:47 of U.S. Pat. No. 9,233,131), AAVhEr1.16 (SEQ ID NO:48 of U.S. Pat. No. 9,233,131), AAVhEr1.18 (SEQ ID NO:49 of U.S. Pat. No. 9,233,131), AAVhEr1.35 (SEQ ID NO:50 of U.S. Pat. No. 9,233,131), AAVhEr1.7 (SEQ ID NO:51 of U.S. Pat. No. 9,233,131), AAVhEr1.36 (SEQ ID NO:52 of U.S. Pat. No. 9,233,131), AAVhEr2.29 (SEQ ID NO:53 of U.S. Pat. No. 9,233,131), AAVhEr2.4 (SEQ ID NO:54 of U.S. Pat. No. 9,233,131), AAVhEr2.16 (SEQ ID NO:55 of U.S. Pat. No. 9,233,131), AAVhEr2.30 (SEQ ID NO:56 of U.S. Pat. No. 9,233,131). AAVhEr2.31 (SEQ ID NO:58 of U.S. Pat. No. 9,233,131). AAVhEr2.36 (SEQ ID NO:57 of U.S. Pat. No. 9,233,131), AAVhER1.23 (SEQ ID NO:53 of U.S. Pat. No. 9,233,131), AAVhEr3.1 (SEQ ID NO:59 of U.S. Pat. No. 9,233,131), AAV2.5T (SEQ ID NO:42 of U.S. Pat. No. 9,233,131), or variants thereof.

[0055] In some embodiments, the AAV serotype may be, or have, a sequence as described in U.S. Patent Application Publication No. US20150376607, the contents of which are herein incorporated by reference in their entirety, such as, but not limited to, AAV-PAEC (SEQ ID NO:1 of US20150376607). AAV-LK01 (SEQ ID NO:2 of US20150376607), AAV-LK02 (SEQ ID NO:3 of US20150376607), AAV-LK03 (SEQ ID NO:4 of US20150376607), AAV-LK04 (SEQ ID NO:5 of US20150376607), AAV-LK05 (SEQ ID NO:6 of US20150376607), AAV-LK06 (SEQ ID NO:7 of US20150376607), AAV-LK07 (SEQ ID NO:8 of US20150376607), AAV-LK08 (SEQ ID NO:9 of US20150376607), AAV-LK09 (SEQ ID NO:10 of US20150376607). AAV-LK10 (SEQ ID NO:11 of US20150376607), AAV-LK11 (SEQ ID NO:12 of US20150376607). AAV-LK12 (SEQ ID NO:13 of US20150376607), AAV-LK13 (SEQ ID NO:14 of US20150376607), AAV-LK14 (SEQ ID NO:15 of US20150376607), AAV-LK15 (SEQ ID NO:16 of US20150376607), AAV-LK16 (SEQ ID NO:17 of US20150376607), AAV-LK17 (SEQ ID NO:18 of US20150376607), AAV-LK18 (SEQ ID NO:19 of US20150376607), AAV-LK19 (SEQ ID NO:20 of US20150376607), AAV-PAEC2 (SEQ ID NO:21 of US20150376607), AAV-PAEC4 (SEQ ID NO:22 of US20150376607), AAV-PAEC6 (SEQ ID NO:23 of US20150376607), AAV-PAEC7 (SEQ ID NO:24 of US20150376607), AAV-PAEC8 (SEQ ID NO:25 of US20150376607), AAV-PAEC11 (SEQ ID NO:26 of US20150376607), AAV-PAEC12 (SEQ ID NO:27, of US20150376607), or variants thereof.

[0056] In some embodiments, the AAV serotype may be, or have, a sequence as described in U.S. Pat. No. 9,163,261, the contents of which are herein incorporated by reference in their entirety, such as, but not limited to, AAV-2-pre-miRNA-101 (SEQ ID NO: 1 U.S. Pat. No. 9,163,261), or variants thereof.

[0057] In some embodiments, the AAV serotype may be, or have, a sequence as described in U.S. Patent Application Publication No. US20150376240, the contents of which are herein incorporated by reference in their entirety, such as, but not limited to, AAV-8h (SEQ ID NO: 6 of US20150376240), AAV-8b (SEQ ID NO: 5 of US20150376240), AAV-h (SEQ ID NO: 2 of US20150376240), AAV-b (SEQ ID NO: 1 of US20150376240), or variants thereof.

[0058] In some embodiments, the AAV serotype may be, or have, a sequence as described in U.S. Patent Application Publication No. US20160017295, the contents of which are herein incorporated by reference in their entirety, such as, but not limited to, AAV SM 10-2 (SEQ ID NO: 22 of US20160017295). AAV Shuffle 100-1 (SEQ ID NO: 23 of US20160017295), AAV Shuffle 100-3 (SEQ ID NO: 24 of US20160017295), AAV Shuffle 100-7 (SEQ ID NO: 25 of US20160017295), AAV Shuffle 10-2 (SEQ ID NO: 34 of US20160017295), AAV Shuffle 10-6 (SEQ ID NO: 35 of US20160017295), AAV Shuffle 10-8 (SEQ ID NO: 36 of US20160017295), AAV Shuffle 100-2 (SEQ ID NO: 37 of US20160017295), AAV SM 10-1 (SEQ ID NO: 38 of US20160017295), AAV SM 10-8 (SEQ ID NO: 39 of US20160017295). AAV SM 100-3 (SEQ ID NO: 40 of US20160017295), AAV SM 100-10 (SEQ ID NO: 41 of US20160017295), or variants thereof.

[0059] In some embodiments, the AAV serotype may be, or have, a sequence as described in United States Patent Publication No. US20150238550, the contents of which are herein incorporated by reference in their entirety, such as, but not limited to, BNP61 AAV (SEQ ID NO: 1 of US20150238550), BNP62 AAV (SEQ ID NO: 3 of US20150238550), BNP63 AAV (SEQ ID NO: 4 of US20150238550), or variants thereof.

[0060] In some embodiments, the AAV serotype may be or may have a sequence as described in United States Patent Publication No. US20150315612, the contents of which are herein incorporated by reference in their entirety, such as, but not limited to, AAVrh.50 (SEQ ID NO: 108 of US20150315612), AAVrh.43 (SEQ ID NO: 163 of US20150315612), AAVrh.62 (SEQ ID NO: 114 of US20150315612), AAVrh.48 (SEQ ID NO: 115 of US20150315612), AAVhu.19 (SEQ ID NO: 133 of US20150315612), AAVhu.11 (SEQ ID NO: 153 of US20150315612), AAVhu.53 (SEQ ID NO: 186 of US20150315612), AAV4-8/rh.64 (SEQ ID No: 15 of US20150315612), AAVLG-9/hu.39 (SEQ ID No: 24 of US20150315612), AAV54.5/hu.23 (SEQ ID No: 60 of US20150315612), AAV54.2/hu.22 (SEQ ID No: 67 of US20150315612), AAV54.7/hu.24 (SEQ ID No: 66 of US20150315612), AAV54.1/hu.21 (SEQ ID No: 65 of US20150315612), AAV54.4R/hu.27 (SEQ ID No: 64 of US20150315612), AAV46.2/hu.28 (SEQ ID No: 68 of US20150315612), AAV46.6/hu.29 (SEQ ID No: 69 of US20150315612). AAV128.1l/hu.43 (SEQ ID No: 80 of US20150315612), or variants thereof.

[0061] In some embodiments, the AAV serotype may be, or have, a sequence as described in International Publication No. WO2015121501, the contents of which are herein incorporated by reference in their entirety, such as, but not limited to, true type AAV (ttAAV) (SEQ ID NO: 2 of WO2015121501), “UPenn AAV10” (SEQ ID NO: 8 of WO2015121501), “Japanese AAV10” (SEQ ID NO: 9 of WO2015121501), or variants thereof.

[0062] According to the present disclosure, AAV capsid serotype selection or use may be from a variety of species. In one embodiment, the AAV may be an avian AAV (AAAV). The AAAV serotype may be, or have, a sequence as described in U.S. Pat. No. 9,238,800, the contents of which are herein incorporated by reference in their entirety, such as, but not limited to, AAAV (SEQ ID NO: 1, 2, 4, 6, 8, 10, 12, and 14 of U.S. Pat. No. 9,238,800), or variants thereof.

[0063] In one embodiment, the AAV may be a bovine AAV (BAAV). The BAAV serotype may be, or have, a sequence as described in U.S. Pat. No. 9,193,769, the contents of which are herein incorporated by reference in their entirety, such as, but not limited to, BAAV (SEQ ID NO: 1 and 6 of U.S. Pat. No. 9,193,769), or variants thereof. The BAAV serotype may be or have a sequence as described in U.S. Pat. No. 7,427,396, the contents of which are herein incorporated by reference in their entirety, such as, but not limited to, BAAV (SEQ ID NO: 5 and 6 of U.S. Pat. No. 7,427,396), or variants thereof.

[0064] In one embodiment, the AAV may be a caprine AAV. The caprine AAV serotype may be, or have, a sequence as described in U.S. Pat. No. 7,427,396, the contents of which are herein incorporated by reference in their entirety, such as, but not limited to, caprine AAV (SEQ ID NO: 3 of U.S. Pat. No. 7,427,396), or variants thereof.

[0065] In other embodiments the AAV may be engineered as a hybrid AAV from two or more parental serotypes. In one embodiment, the AAV may be AAV2G9 which comprises sequences from AAV2 and AAV9. The AAV2G9 AAV serotype may be, or have, a sequence as described in U.S. Patent Application Publication No. US20160017005, the contents of which are herein incorporated by reference in their entirety.

[0066] In one embodiment, the AAV may be a serotype generated by the AAV9 capsid library with mutations in amino acids 390-627 (VP1 numbering) as described by Pulicherla et al. (Molecular Therapy 19(6):1070-1078 (2011), the contents of which are herein incorporated by reference in their entirety. The serotype and corresponding nucleotide and amino acid substitutions may be, but is not limited to, AAV9.1 (G1594C; D532H), AAV6.2 (T1418A and T1436X; V473D and I479K), AAV9.3 (T238A; F413Y), AAV9.4 (T1250C and A1617T; F417S), AAV9.5 (A1235G, A1314T, A1642G, C1760T; Q412R, T548A, A587V), AAV9.6 (T1231A; F4111), AAV9.9 (G1203A, G1785T; W595C), AAV9.10 (A1500G, T1676C; M559T), AAV9.11 (A1425T, A1702C, A1769T; T568P, Q590L), AAV9.13 (A1369C, A1720T; N457H, T574S), AAV9.14 (T1340A, T1362C, T560C, G1713A; L447H), AAV9.16 (A1775T; Q592L), AAV9.24 (T1507C, T1521G; W503R), AAV9.26 (A1337G, A1769C; Y446C, Q590P), AAV9.33 (A1667C; D556A), AAV9.34 (A1534G, C1794T; N512D), AAV9.35 (A1289T, T450A, C1494T, A1515T, C794A, G1816A; Q430L, Y484N, N98K, V606I), AAV9.40 (A1694T, E565V), AAV9.41 (A1348T, T1362C; T450S), AAV9.44 (A1684C, A1701T, A1737G; N562H, K567N), AAV9.45 (A1492T, C1804T; N498Y, L602F), AAV9.46 (G1441C, T1525C, T1549G; G481R, W509R, L517V), 9.47 (G1241A, G1358A, A16690, C1745T; S414N, G453D, K557E, T582I), AAV9.48 (C1445T, A1736T; P482L, Q579L), AAV9.50 (A1638T C1683T, T1805A; Q546H, L602H), AAV9.53 (G1301A, A1405C, C1664T, G1811T; R134Q, S469R, A555V, G604V), AAV9.54 (C1531A, T1609A; L5111, L537M), AAV9.55 (T1605A; F535L), AAV9.58 (C1475T, C1579A; T4921, H527N), AAV.59 (T1336C; Y446H), AAV9.61 (A1493T; N498I), AAV9.64 (C1531A, A1617T; L511I), AAV9.65 (C1335T, T1530C, C1568A; A523D), AAV9.68 (C1510A; P504T), AAV9.80 (G1441A; G481R), AAV9.83 (C1402A, A1500T; P468T, E500D), AAV9.87 (T1464C, T1468C; S490P), AAV9.90 (A1196T; Y399F), AAV9.91 (T1316G, A1583T, C1782G, T1806C; L439R, K5281), AAV9.93 (A1273G, A1421G, A1638C, C1712T, G1732A, A1744T, A1832T; S425G, Q474R, Q546H, P571L, G578R, T582S, D611V), AAV9.94 (A1675T; M559L) and AAV9.95 (T1605A; F535L).

[0067] In some embodiments, the AAV serotype may be, or have, a sequence as described in International Publication No. WO2016049230, the contents of which are herein incorporated by reference in their entirety, such as, but not limited to AAVF1/HSC1 (SEQ ID NO: 2 and 20 of WO2016049230), AAVF2/HSC2 (SEQ ID NO: 3 and 21 of WO2016049230), AAVF3/HSC3 (SEQ ID NO: 5 and 22 of WO2016049230), AAVF4/HSC4 (SEQ ID NO: 6 and 23 of WO2016049230). AAVF5/HSC5 (SEQ ID NO: 11 and 25 of WO2016049230), AAVF6/HSC6 (SEQ ID NO: 7 and 24 of WO2016049230), AAVF7/HSC7 (SEQ ID NO: 8 and 27 of WO2016049230), AAVF8/HSC8 (SEQ ID NO: 9 and 28 of WO2016049230). AAVF9/HSC9 (SEQ ID NO: 10 and 29 of WO2016049230), AAVF11/HSC11 (SEQ ID NO: 4 and 26 of WO2016049230), AAVF12/HSC12 (SEQ ID NO: 12 and 30 of WO2016049230), AAVF13/HSC13 (SEQ ID NO: 14 and 31 of WO2016049230), AAVF14/HSC14 (SEQ ID NO: 15 and 32 of WO2016049230), AAVF15/HSC5 (SEQ ID NO: 16 and 33 of WO2016049230), AAVF16/HSC16 (SEQ ID NO: 17 and 34 of WO2016049230), AAVF17/HSC17 (SEQ ID NO: 13 and 35 of WO2016049230), or variants or derivatives thereof.

[0068] In some embodiments, the AAV serotype may be, or have, a sequence as described in U.S. Pat. No. 8,734,809, the contents of which are herein incorporated by reference in their entirety, such as, but not limited to, AAV CBr-E1 (SEQ ID NO: 13 and 87 of U.S. Pat. No. 8,734,809), AAV CBr-E2 (SEQ ID NO: 14 and 88 of U.S. Pat. No. 8,734,809), AAV CBr-E3 (SEQ ID NO: 15 and 89 of U.S. Pat. No. 8,734,809), AAV CBr-E4 (SEQ ID NO: 16 and 90 of U.S. Pat. No. 8,734,809), AAV CBr-E5 (SEQ ID NO: 17 and 91 of U.S. Pat. No. 8,734,809), AAV CBr-e5 (SEQ ID NO: 18 and 92 of U.S. Pat. No. 8,734,809), AAV CBr-E6 (SEQ ID NO: 19 and 93 of U.S. Pat. No. 8,734,809), AAV CBr-E7 (SEQ ID NO: 20 and 94 of U.S. Pat. No. 8,734,809), AAV CBr-E8 (SEQ ID NO: 21 and 95 of U.S. Pat. No. 8,734,809), AAV CLv-D1 (SEQ ID NO: 22 and 96 of U.S. Pat. No. 8,734,809), AAV CLv-D2 (SEQ ID NO: 23 and 97 of U.S. Pat. No. 8,734,809), AAV CLv-D3 (SEQ ID NO: 24 and 98 of U.S. Pat. No. 8,734,809), AAV CLv-D4 (SEQ ID NO: 25 and 99 of U.S. Pat. No. 8,734,809), AAV CLv-D5 (SEQ ID NO: 26 and 100 of U.S. Pat. No. 8,734,809), AAV CLv-D6 (SEQ ID NO: 27 and 101 of U.S. Pat. No. 8,734,809), AAV CLv-D7 (SEQ ID NO: 28 and 102 of U.S. Pat. No. 8,734,809), AAV CLv-D8 (SEQ ID NO: 29 and 103 of U.S. Pat. No. 8,734,809), AAV CLv-E1 (SEQ ID NO: 13 and 87 of U.S. Pat. No. 8,734,809), AAV CLv-R1 (SEQ ID NO: 30 and 104 of U.S. Pat. No. 8,734,809), AAV CLv-R2 (SEQ ID NO: 31 and 105 of U.S. Pat. No. 8,734,809), AAV CLv-R3 (SEQ ID NO: 32 and 106 of U.S. Pat. No. 8,734,809), AAV CLv-R4 (SEQ ID NO: 33 and 107 of U.S. Pat. No. 8,734,809), AAV CLv-R5 (SEQ ID NO: 34 and 108 of U.S. Pat. No. 8,734,809), AAV CLv-R6 (SEQ ID NO: 35 and 109 of U.S. Pat. No. 8,734,809), AAV CLv-R7 (SEQ ID NO: 36 and 110 of U.S. Pat. No. 8,734,809), AAV CLv-R8 (SEQ ID NO: X and X of U.S. Pat. No. 8,734,809), AAV CLv-R9 (SEQ ID NO: X and X of U.S. Pat. No. 8,734,809), AAV CLg-F1 (SEQ ID NO: 39 and 113 of U.S. Pat. No. 8,734,809), AAV CLg-F2 (SEQ ID NO: 40 and 114 of U.S. Pat. No. 8,734,809), AAV CLg-F3 (SEQ ID NO: 41 and 115 of U.S. Pat. No. 8,734,809), AAV CLg-F4 (SEQ ID NO: 42 and 116 of U.S. Pat. No. 8,734,809), AAV CLg-F5 (SEQ ID NO: 43 and 117 of U.S. Pat. No. 8,734,809), AAV CLg-F6 (SEQ ID NO: 43 and 117 of U.S. Pat. No. 8,734,809), AAV CLg-F7 (SEQ ID NO: 44 and 118 of U.S. Pat. No. 8,734,809), AAV CLg-F8 (SEQ ID NO: 43 and 117 of U.S. Pat. No. 8,734,809), AAV CSp-1 (SEQ ID NO: 45 and 119 of U.S. Pat. No. 8,734,809), AAV CSp-10 (SEQ ID NO: 46 and 120 of U.S. Pat. No. 8,734,809), AAV CSp-11 (SEQ ID NO: 47 and 121 of US8734809), AAV CSp-2 (SEQ ID NO: 48 and 122 of U.S. Pat. No. 8,734,809), AAV CSp-3 (SEQ ID NO: 49 and 123 of U.S. Pat. No. 8,734,809), AAV CSp-4 (SEQ ID NO: 50 and 124 of U.S. Pat. No. 8,734,809), AAV CSp-6 (SEQ ID NO: 51 and 125 of U.S. Pat. No. 8,734,809), AAV CSp-7 (SEQ ID NO: 52 and 126 of U.S. Pat. No. 8,734,809), AAV CSp-8 (SEQ ID NO: 53 and 127 of U.S. Pat. No. 8,734,809), AAV CSp-9 (SEQ ID NO: 54 and 128 of U.S. Pat. No. 8,734,809), AAV CHt-2 (SEQ ID NO: 55 and 129 of U.S. Pat. No. 8,734,809), AAV CHt-3 (SEQ ID NO: 56 and 130 of U.S. Pat. No. 8,734,809), AAV CKd-1 (SEQ ID NO: 57 and 131 of U.S. Pat. No. 8,734,809), AAV CKd-10 (SEQ ID NO: 58 and 132 of U.S. Pat. No. 8,734,809), AAV CKd-2 (SEQ ID NO: 59 and 133 of U.S. Pat. No. 8,734,809), AAV CKd-3 (SEQ ID NO: 60 and 134 of U.S. Pat. No. 8,734,809), AAV CKd-4 (SEQ ID NO: 61 and 135 of U.S. Pat. No. 8,734,809), AAV CKd-6 (SEQ ID NO: 62 and 136 of U.S. Pat. No. 8,734,809), AAV CKd-7 (SEQ ID NO: 63 and 137 of U.S. Pat. No. 8,734,809), AAV CKd-8 (SEQ ID NO: 64 and 138 of U.S. Pat. No. 8,734,809), AAV CLv-1 (SEQ ID NO: 35 and 139 of U.S. Pat. No. 8,734,809), AAV CLv-12 (SEQ ID NO: 66 and 140 of U.S. Pat. No. 8,734,809), AAV CLv-13 (SEQ ID NO: 67 and 141 of U.S. Pat. No. 8,734,809), AAV CLv-2 (SEQ ID NO: 68 and 142 of U.S. Pat. No. 8,734,809), AAV CLv-3 (SEQ ID NO: 69 and 143 of U.S. Pat. No. 8,734,809), AAV CLv-4 (SEQ ID NO: 70 and 144 of U.S. Pat. No. 8,734,809), AAV CLv-6 (SEQ ID NO: 71 and 145 of U.S. Pat. No. 8,734,809), AAV CLv-8 (SEQ ID NO: 72 and 146 of U.S. Pat. No. 8,734,809), AAV CKd-B1 (SEQ ID NO: 73 and 147 of U.S. Pat. No. 8,734,809), AAV CKd-B2 (SEQ ID NO: 74 and 148 of U.S. Pat. No. 8,734,809), AAV CKd-B3 (SEQ ID NO: 75 and 149 of U.S. Pat. No. 8,734,809), AAV CKd-B4 (SEQ ID NO: 76 and 150 of U.S. Pat. No. 8,734,809), AAV CKd-B5 (SEQ ID NO: 77 and 151 of U.S. Pat. No. 8,734,809), AAV CKd-B6 (SEQ ID NO: 78 and 152 of U.S. Pat. No. 8,734,809), AAV CKd-B7 (SEQ ID NO: 79 and 153 of U.S. Pat. No. 8,734,809), AAV CKd-B8 (SEQ ID NO: 80 and 154 of U.S. Pat. No. 8,734,809), AAV CKd-H1 (SEQ ID NO: 81 and 155 of U.S. Pat. No. 8,734,809), AAV CKd-H2 (SEQ ID NO: 82 and 156 of U.S. Pat. No. 8,734,809), AAV CKd-H3 (SEQ ID NO: 83 and 157 of U.S. Pat. No. 8,734,809), AAV CKd-H4 (SEQ ID NO: 84 and 158 of U.S. Pat. No. 8,734,809), AAV CKd-H5 (SEQ ID NO: 85 and 159 of U.S. Pat. No. 8,734,809), AAV CKd-H6 (SEQ ID NO: 77 and 151 of U.S. Pat. No. 8,734,809), AAV CHt-1 (SEQ ID NO: 86 and 160 of U.S. Pat. No. 8,734,809). AAV CLv1-1 (SEQ ID NO: 171 of U.S. Pat. No. 8,734,809), AAV CLv1-2 (SEQ ID NO: 172 of U.S. Pat. No. 8,734,809), AAV CLv1-3 (SEQ ID NO: 173 of U.S. Pat. No. 8,734,809), AAV CLv1-4 (SEQ ID NO: 174 of U.S. Pat. No. 8,734,809), AAV Clv1-7 (SEQ ID NO: 175 of U.S. Pat. No. 8,734,809), AAV Clv1-8 (SEQ ID NO: 176 of U.S. Pat. No. 8,734,809), AAV Clv1-9 (SEQ ID NO: 177 of U.S. Pat. No. 8,734,809), AAV Clv1-10 (SEQ ID NO: 178 of U.S. Pat. No. 8,734,809), AAV.VR-355 (SEQ ID NO: 181 of U.S. Pat. No. 8,734,809), AAV.hu.48R3 (SEQ ID NO: 183 of U.S. Pat. No. 8,734,809), or variants or derivatives thereof.

[0069] In some embodiments, the AAV serotype may be, or have, a sequence as described in International Publication No. WO2016065001, the contents of which are herein incorporated by reference in their entirety, such as, but not limited to AAV CHt-P2 (SEQ ID NO: 1 and 51 of WO2016065001), AAV CHt-P5 (SEQ ID NO: 2 and 52 of WO2016065001), AAV CHt-P9 (SEQ ID NO: 3 and 53 of WO2016065001), AAV CBr-7.1 (SEQ ID NO: 4 and 54 of WO2016065001), AAV CBr-7.2 (SEQ ID NO: 5 and 55 of WO2016065001), AAV CBr-7.3 (SEQ ID NO: 6 and 56 of WO2016065001), AAV CBr-7.4 (SEQ ID NO: 7 and 57 of WO2016065001), AAV CBr-7.5 (SEQ ID NO: 8 and 58 of WO2016065001), AAV CBr-7.7 (SEQ ID NO: 9 and 59 of WO2016065001), AAV CBr-7.8 (SEQ ID NO: 10 and 60 of WO2016065001), AAV CBr-7.10 (SEQ ID NO: 11 and 61 of WO2016065001). AAV CKd-N3 (SEQ ID NO: 12 and 62 of WO2016065001). AAV CKd-N4 (SEQ ID NO: 13 and 63 of WO2016065001), AAV CKd-N9 (SEQ ID NO: 14 and 64 of WO2016065001), AAV CLv-L4 (SEQ ID NO: 15 and 65 of WO2016065001), AAV CLv-L5 (SEQ ID NO: 16 and 66 of WO2016065001), AAV CLv-L6 (SEQ ID NO: 17 and 67 of WO2016065001), AAV CLv-K1 (SEQ ID NO: 18 and 68 of WO2016065001), AAV CLv-K3 (SEQ ID NO: 19 and 69 of WO2016065001), AAV CLv-K6 (SEQ ID NO: 20 and 70 of WO2016065001), AAV CLv-M1 (SEQ ID NO: 21 and 71 of WO2016065001), AAV CLv-M11 (SEQ ID NO: 22 and 72 of WO2016065001), AAV CLv-M2 (SEQ ID NO: 23 and 73 of WO2016065001). AAV CLv-M5 (SEQ ID NO: 24 and 74 of WO2016065001), AAV CLv-M6 (SEQ ID NO: 25 and 75 of WO2016065001). AAV CLv-M7 (SEQ ID NO: 26 and 76 of WO2016065001), AAV CLv-M8 (SEQ ID NO: 27 and 77 of WO2016065001), AAV CLv-M9 (SEQ ID NO: 28 and 78 of WO2016065001), AAV CHt-P1 (SEQ ID NO: 29 and 79 of WO2016065001). AAV CHt-P6 (SEQ ID NO: 30 and 80 of WO2016065001), AAV CHt-P8 (SEQ ID NO: 31 and 81 of WO2016065001). AAV CHt-6.1 (SEQ ID NO: 32 and 82 of WO2016065001), AAV CHt-6.10 (SEQ ID NO: 33 and 83 of WO2016065001), AAV CHt-6.5 (SEQ ID NO: 34 and 84 of WO2016065001), AAV CHt-6.6 (SEQ ID NO: 35 and 85 of WO2016065001), AAV CHt-6.7 (SEQ ID NO: 36 and 86 of WO2016065001), AAV CHt-6.8 (SEQ ID NO: 37 and 87 of WO2016065001), AAV CSp-8.10 (SEQ ID NO: 38 and 88 of WO2016065001), AAV CSp-8.2 (SEQ ID NO: 39 and 89 of WO2016065001), AAV CSp-8.4 (SEQ ID NO: 40 and 90 of WO2016065001), AAV CSp-8.5 (SEQ ID NO: 41 and 91 of WO2016065001). AAV CSp-8.6 (SEQ ID NO: 42 and 92 of WO2016065001). AAV CSp-8.7 (SEQ ID NO: 43 and 93 of WO2016065001), AAV CSp-8.8 (SEQ ID NO: 44 and 94 of WO2016065001), AAV CSp-8.9 (SEQ ID NO: 45 and 95 of WO2016065001), AAV CBr-B7.3 (SEQ ID NO: 46 and 96 of WO2016065001). AAV CBr-B7.4 (SEQ ID NO: 47 and 97 of WO2016065001), AAV3B (SEQ ID NO: 48 and 98 of WO2016065001). AAV4 (SEQ ID NO: 49 and 99 of WO2016065001), AAV5 (SEQ ID NO: 50 and 100 of WO2016065001), or variants or derivatives thereof.

[0070] In one embodiment, the AAV particle may be a serotype selected from any of those found in Table 1.

[0071] In one embodiment, the AAV particle may comprise a sequence, fragment or variant thereof, of the sequences in Table 1.

[0072] In one embodiment, the AAV particle may be encoded by a sequence, fragment or variant as described in Table 1.

TABLE 1
AAV Serotypes

| Serotype | SEQ ID NO | Reference Information |
|---|---|---|
| VOY101 | 1 or | — |
| | 1809 | |
| VOY201 | 1810 or | — |
| | 1823 | |
| VOY801 | 1824 | |
| VOY1101 | 1825 | |
| PHP.N/PHP.B-DGT | 2 | WO2017100671 SEQ ID NO: 46 |
| AAVPHP.B or G2B-26 | 3 | WO2015038958 SEQ ID NO: 8 and 13 |
| AAVPHP.B | 4 | WO2015038958 SEQ ID NO: 9 |
| AAVG2B-13 | 5 | WO2015038958 SEQ ID NO: 12 |
| AAVTH1.1-32 | 6 | WO2015038958 SEQ ID NO: 14 |
| AAVTH1.1-35 | 7 | WO2015038958 SEQ ID NO: 15 |
| PHP.S/G2A12 | 8 | WO2017100671 SEQ ID NO: 47 |
| AAV9/hu.14 K449R | 9 | WO2017100671 SEQ ID NO: 45 |
| AAV1 | 10 | US20150159173 SEQ ID NO: 11, US20150315612 SEQ ID NO: 202 |
| AAV1 | 11 | US20160017295 SEQ ID NO: 1, US20030138772 SEQ ID NO: 64, |
| | | US20150159173 SEQ ID NO: 27, US20150315612 SEQ ID NO: 219, |
| | | U.S. Pat. No. 7,198,951 SEQ ID NO: 5 |
| AAV1 | 12 | US20030138772 SEQ ID NO: 6 |
| AAV1.3 | 13 | US20030138772 SEQ ID NO: 14 |
| AAV10 | 14 | US20030138772 SEQ ID NO: 117 |
| AAV10 | 15 | WO2015121501 SEQ ID NO: 9 |
| AAV10 | 16 | WO2015121501 SEQ ID NO: 8 |
| AAV11 | 17 | US20030138772 SEQ ID NO: 118 |
| AAV12 | 18 | US20030138772 SEQ ID NO: 119 |
| AAV2 | 19 | US20150159173 SEQ ID NO: 7, US20150315612 SEQ ID NO: 211 |
| AAV2 | 20 | US20030138772 SEQ ID NO: 70, US20150159173 SEQ ID NO: 23, |
| | | US20150315612 SEQ ID NO: 221, US20160017295 SEQ ID NO: 2, |
| | | U.S. Pat. No. 6,156,303 SEQ ID NO: 4, U.S. Pat. No. 7,198,951 |
| | | SEQ ID NO: 4, WO2015121501 SEQ ID NO: 1 |
| AAV2 | 21 | U.S. Pat. No. 6, 156, 303 SEQ ID NO: 8 |
| AAV2 | 22 | US20030138772 SEQ ID NO: 7 |
| AAV2 | 23 | U.S. Pat. No. 6,156,303 SEQ ID NO: 3 |
| AAV2.5T | 24 | U.S. Pat. No. 9,233,131 SEQ ID NO: 42 |
| AAV223.10 | 25 | US20030138772 SEQ ID NO: 75 |
| AAV223.2 | 26 | US20030138772 SEQ ID NO: 49 |
| AAV223.2 | 27 | US20030138772 SEQ ID NO: 76 |
| AAV223.4 | 28 | US20030138772 SEQ ID NO: 50 |
| AAV223.4 | 29 | US20030138772 SEQ ID NO: 73 |
| AAV223.5 | 30 | US20030138772 SEQ ID NO: 51 |
| AAV223.5 | 31 | US20030138772 SEQ ID NO: 74 |
| AAV223.6 | 32 | US20030138772 SEQ ID NO: 52 |
| AAV223.6 | 33 | US20030138772 SEQ ID NO: 78 |
| AAV223.7 | 34 | US20030138772 SEQ ID NO: 53 |
| AAV223.7 | 35 | US20030138772 SEQ ID NO: 77 |
| AAV29.3 | 36 | US20030138772 SEQ ID NO: 82 |
| AAV29.4 | 37 | US20030138772 SEQ ID NO: 12 |
| AAV29.5 | 38 | US20030138772 SEQ ID NO: 83 |
| AAV29.5 (AAVbb.2) | 39 | US20030138772 SEQ ID NO: 13 |
| AAV3 | 40 | US20150159173 SEQ ID NO: 12 |
| AAV3 | 41 | US20030138772 SEQ ID NO: 71, US20150159173 SEQ ID NO: 28, |
| | | US20160017295 SEQ ID NO: 3, U.S. Pat. No. 7,198,951 SEQ ID NO: 6 |
| AAV3 | 42 | US20030138772 SEQ ID NO: 8 |
| AAV3.3b | 43 | US20030138772 SEQ ID NO: 72 |
| AAV3-3 | 44 | US20150315612 SEQ ID NO: 200 |
| AAV3-3 | 45 | US20150315612 SEQ ID NO: 217 |
| AAV3a | 46 | U.S. Pat. No. 6,156,303 SEQ ID NO: 5 |
| AAV3a | 47 | U.S. Pat. No. 6,156,303 SEQ ID NO: 9 |
| AAV3b | 48 | U.S. Pat. No. 6,156,303 SEQ ID NO: 6 |
| AAV3b | 49 | U.S. Pat. No. 6,156,303 SEQ ID NO: 10 |
| AAV3b | 50 | U.S. Pat. No. 6,156,303 SEQ ID NO: 1 |
| AAV4 | 51 | US20140348794 SEQ ID NO: 17 |
| AAV4 | 52 | US20140348794 SEQ ID NO: 5 |
| AAV4 | 53 | US20140348794 SEQ ID NO: 3 |
| AAV4 | 54 | US20140348794 SEQ ID NO: 14 |
| AAV4 | 55 | US20140348794 SEQ ID NO: 15 |
| AAV4 | 56 | US20140348794 SEQ ID NO: 19 |
| AAV4 | 57 | US20140348794 SEQ ID NO: 12 |
| AAV4 | 58 | US20140348794 SEQ ID NO: 13 |
| AAV4 | 59 | US20140348794 SEQ ID NO: 7 |
| AAV4 | 60 | US20140348794 SEQ ID NO: 8 |
| AAV4 | 61 | US20140348794 SEQ ID NO: 9 |
| AAV4 | 62 | US20140348794 SEQ ID NO: 2 |
| AAV4 | 63 | US20140348794 SEQ ID NO: 10 |
| AAV4 | 64 | US20140348794 SEQ ID NO: 11 |
| AAV4 | 65 | US20140348794 SEQ ID NO: 18 |
| AAV4 | 66 | US20030138772 SEQ ID NO: 63, US20160017295 SEQ ID NO: 4, |
| | | US20140348794 SEQ ID NO: 4 |
| AAV4 | 67 | US20140348794 SEQ ID NO: 16 |
| AAV4 | 68 | US20140348794 SEQ ID NO: 20 |
| AAV4 | 69 | US20140348794 SEQ ID NO: 6 |
| AAV4 | 70 | US20140348794 SEQ ID NO: 1 |
| AAV42.2 | 71 | US20030138772 SEQ ID NO: 9 |
| AAV42.2 | 72 | US20030138772 SEQ ID NO: 102 |
| AAV42.3b | 73 | US20030138772 SEQ ID NO: 36 |
| AAV42.3B | 74 | US20030138772 SEQ ID NO: 107 |
| AAV42.4 | 75 | US20030138772 SEQ ID NO: 33 |
| AAV42.4 | 76 | US20030138772 SEQ ID NO: 88 |
| AAV42.8 | 77 | US20030138772 SEQ ID NO: 27 |
| AAV42.8 | 78 | US20030138772 SEQ ID NO: 85 |
| AAV43.1 | 79 | US20030138772 SEQ ID NO: 39 |
| AAV43.1 | 80 | US20030138772 SEQ ID NO: 92 |
| AAV43.12 | 81 | US20030138772 SEQ ID NO: 41 |
| AAV43.12 | 82 | US20030138772 SEQ ID NO: 93 |
| AAV43.20 | 83 | US20030138772 SEQ ID NO: 42 |
| AAV43.20 | 84 | US20030138772 SEQ ID NO: 99 |
| AAV43.21 | 85 | US20030138772 SEQ ID NO: 43 |
| AAV43.21 | 86 | US20030138772 SEQ ID NO: 96 |
| AAV43.23 | 87 | US20030138772 SEQ ID NO: 44 |
| AAV43.23 | 88 | US20030138772 SEQ ID NO: 98 |
| AAV43.25 | 89 | US20030138772 SEQ ID NO: 45 |
| AAV43.25 | 90 | US20030138772 SEQ ID NO: 97 |
| AAV43.5 | 91 | US20030138772 SEQ ID NO: 40 |
| AAV43.5 | 92 | US20030138772 SEQ ID NO: 94 |
| AAV4-4 | 93 | US20150315612 SEQ ID NO: 201 |
| AAV4-4 | 94 | US20150315612 SEQ ID NO: 218 |
| AAV44.1 | 95 | US20030138772 SEQ ID NO: 46 |
| AAV44.1 | 96 | US20030138772 SEQ ID NO: 79 |
| AAV44.5 | 97 | US20030138772 SEQ ID NO: 47 |
| AAV44.5 | 98 | US20030138772 SEQ ID NO: 80 |
| AAV4407 | 99 | US20150315612 SEQ ID NO: 90 |
| AAV5 | 100 | U.S. Pat. No. 7,427,396 SEQ ID NO: 1 |
| AAV5 | 101 | US20030138772 SEQ ID NO: 114 |
| AAV5 | 102 | US20160017295 SEQ ID NO: 5, U.S. Pat. No. 7,427,396 SEQ ID NO: 2, |
| | | US20150315612 SEQ ID NO: 216 |
| AAV5 | 103 | US20150315612 SEQ ID NO: 199 |
| AAV6 | 104 | US20150159173 SEQ ID NO: 13 |
| AAV6 | 105 | US20030138772 SEQ ID NO: 65, US20150159173 SEQ ID NO: 29, |
| | | US20160017295 SEQ ID NO: 6, U.S. Pat. No. 6,156,303 SEQ ID NO: 7 |
| AAV6 | 106 | U.S. Pat. No. 6,156,303 SEQ ID NO: 11 |
| AAV6 | 107 | U.S. Pat. No. 6,156,303 SEQ ID NO: 2 |
| AAV6 | 108 | US20150315612 SEQ ID NO: 203 |
| AAV6 | 109 | US20150315612 SEQ ID NO: 220 |
| AAV6.1 | 110 | US20150159173 |
| AAV6.12 | 111 | US20150159173 |
| AAV6.2 | 112 | US20150159173 |
| AAV7 | 113 | US20150159173 SEQ ID NO: 14 |
| AAV7 | 114 | US20150315612 SEQ ID NO: 183 |
| AAV7 | 115 | US20030138772 SEQ ID NO: 2, US20150159173 SEQ ID NO: 30, |
| | | US20150315612 SEQ ID NO: 181, US20160017295 SEQ ID NO: 7 |
| AAV7 | 116 | US20030138772 SEQ ID NO: 3 |
| AAV7 | 117 | US20030138772 SEQ ID NO: 1, US20150315612 SEQ ID NO: 180 |
| AAV7 | 118 | US20150315612 SEQ ID NO: 213 |
| AAV7 | 119 | US20150315612 SEQ ID NO: 222 |
| AAV8 | 120 | US20150159173 SEQ ID NO: 15 |
| AAV8 | 121 | US20150376240 SEQ ID NO: 7 |
| AAV8 | 122 | US20030138772 SEQ ID NO: 4, US20150315612 SEQ ID NO: 182 |
| AAV8 | 123 | US20030138772 SEQ ID NO: 95, US20140359799 SEQ ID NO: 1, |
| | | US20150159173 SEQ ID NO: 31, US20160017295 SEQ ID NO: 8, |
| | | U.S. Pat. No. 7,198,951 SEQ ID NO: 7, US20150315612 SEQ ID NO: 223 |
| AAV8 | 124 | US20150376240 SEQ ID NO: 8 |
| AAV8 | 125 | US20150315612 SEQ ID NO: 214 |
| AAV-8b | 126 | US20150376240 SEQ ID NO: 5 |
| AAV-8b | 127 | US20150376240 SEQ ID NO: 3 |
| AAV-8h | 128 | US20150376240 SEQ ID NO: 6 |
| AAV-8h | 129 | US20150376240 SEQ ID NO: 4 |
| AAV9 | 130 | US20030138772 SEQ ID NO: 5 |
| AAV9 | 131 | U.S. Pat. No. 7,198,951 SEQ ID NO: 1 |
| AAV9 | 132 | US20160017295 SEQ ID NO: 9 |
| AAV9 | 133 | US20030138772 SEQ ID NO: 100, U.S. Pat. No. 7,198,951 SEQ ID NO: 2 |
| AAV9 | 134 | U.S. Pat. No. 7,198,951 SEQ ID NO: 3 |
| AAV9 (AAVhu.14) | 135 | U.S. Pat. No. 7,906,111 SEQ ID NO: 3; WO2015038958 SEQ ID NO: 11 |
| AAV9 (AAVhu.14) | 136 | U.S. Pat. No. 7,906,111 SEQ ID NO: 123; WO2015038958 SEQ ID NO: 2 |
| AAVA3.1 | 137 | US20030138772 SEQ ID NO: 120 |
| AAVA3.3 | 138 | US20030138772 SEQ ID NO: 57 |
| AAVA3.3 | 139 | US20030138772 SEQ ID NO: 66 |
| AAVA3.4 | 140 | US20030138772 SEQ ID NO: 54 |
| AAVA3.4 | 141 | US20030138772 SEQ ID NO: 68 |
| AAVA3.5 | 142 | US20030138772 SEQ ID NO: 55 |
| AAVA3.5 | 143 | US20030138772 SEQ ID NO: 69 |
| AAVA3.7 | 144 | US20030138772 SEQ ID NO: 56 |
| AAVA3.7 | 145 | US20030138772 SEQ ID NO: 67 |
| AAV29.3 (AAVbb.1) | 146 | US20030138772 SEQ ID NO: 11 |
| AAVC2 | 147 | US20030138772 SEQ ID NO: 61 |
| AAVCh.5 | 148 | US20150159173 SEQ ID NO: 46, US20150315612 SEQ ID NO: 234 |
| AAVcy.2 (AAV13.3) | 149 | US20030138772 SEQ ID NO: 15 |
| AAV24.1 | 150 | US20030138772 SEQ ID NO: 101 |
| AAVcy.3 (AAV24.1) | 151 | US20030138772 SEQ ID NO: 16 |
| AAV27.3 | 152 | US20030138772 SEQ ID NO: 104 |
| AAVcy.4 (AAV27.3) | 153 | US20030138772 SEQ ID NO: 17 |
| AAVcy.5 | 154 | US20150315612 SEQ ID NO: 227 |
| AAV7.2 | 155 | US20030138772 SEQ ID NO: 103 |
| AAVcy.5 (AAV7.2) | 156 | US20030138772 SEQ ID NO: 18 |
| AAV16.3 | 157 | US20030138772 SEQ ID NO: 105 |
| AAVcy.6 (AAV16.3) | 158 | US20030138772 SEQ ID NO: 10 |
| AAVcy.5 | 159 | US20150159173 SEQ ID NO: 8 |
| AAVcy.5 | 160 | US20150159173 SEQ ID NO: 24 |
| AAVCy.5R1 | 161 | US20150159173 |
| AAVCy.5R2 | 162 | US20150159173 |
| AAVCy.5R3 | 163 | US20150159173 |
| AAVCy.5R4 | 164 | US20150159173 |
| AAVDJ | 165 | US20140359799 SEQ ID NO: 3, U.S. Pat. No. 7,588,772 SEQ ID NO: 2 |
| AAVDJ | 166 | US20140359799 SEQ ID NO: 2, U.S. Pat. No. 7,588,772 SEQ ID NO: 1 |
| AAVDJ-8 | 167 | U.S. Pat. No. 7,588,772; Grimm et al 2008 |
| AAVDJ-8 | 168 | U.S. Pat. No. 7,588,772; Grimm et al 2008 |
| AAVF5 | 169 | US20030138772 SEQ ID NO: 110 |
| AAVH2 | 170 | US20030138772 SEQ ID NO: 26 |
| AAVH6 | 171 | US20030138772 SEQ ID NO: 25 |
| AAVhE1.1 | 172 | U.S. Pat. No. 9,233,131 SEQ ID NO: 44 |
| AAVhEr1.14 | 173 | U.S. Pat. No. 9,233,131 SEQ ID NO: 46 |
| AAVhEr1.16 | 174 | U.S. Pat. No. 9,233,131 SEQ ID NO: 48 |
| AAVhEr1.18 | 175 | U.S. Pat. No. 9,233,131 SEQ ID NO: 49 |
| AAVhEr1.23 (AAVhEr2.29) | 176 | U.S. Pat. No. 9,233,131 SEQ ID NO: 53 |
| AAVhEr1.35 | 177 | U.S. Pat. No. 9,233,131 SEQ ID NO: 50 |
| AAVhEr1.36 | 178 | U.S. Pat. No. 9,233,131 SEQ ID NO: 52 |
| AAVhEr1.5 | 179 | U.S. Pat. No. 9,233,131 SEQ ID NO: 45 |
| AAVhEr1.7 | 180 | U.S. Pat. No. 9,233,131 SEQ ID NO: 51 |
| AAVhEr1.8 | 181 | U.S. Pat. No. 9,233,131 SEQ ID NO: 47 |
| AAVhEr2.16 | 182 | U.S. Pat. No. 9,233,131 SEQ ID NO: 55 |
| AAVhEr2.30 | 183 | U.S. Pat. No. 9,233,131 SEQ ID NO: 56 |
| AAVhEr2.31 | 184 | U.S. Pat. No. 9,233,131 SEQ ID NO: 58 |
| AAVhEr2.36 | 185 | U.S. Pat. No. 9,233,131 SEQ ID NO: 57 |
| AAVhEr2.4 | 186 | U.S. Pat. No. 9,233,131 SEQ ID NO: 54 |
| AAVhEr3.1 | 187 | U.S. Pat. No. 9,233,131 SEQ ID NO: 59 |
| AAVhu.1 | 188 | US20150315612 SEQ ID NO: 46 |
| AAVhu.1 | 189 | US20150315612 SEQ ID NO: 144 |
| AAVhu.10 (AAV16.8) | 190 | US20150315612 SEQ ID NO: 56 |
| AAVhu.10 (AAV16.8) | 191 | US20150315612 SEQ ID NO: 156 |
| AAVhu.11 (AAV16.12) | 192 | US20150315612 SEQ ID NO: 57 |
| AAVhu.11 (AAV16.12) | 193 | US20150315612 SEQ ID NO: 153 |
| AAVhu.12 | 194 | US20150315612 SEQ ID NO: 59 |
| AAVhu.12 | 195 | US20150315612 SEQ ID NO: 154 |
| AAVhu.13 | 196 | US20150159173 SEQ ID NO: 16, US20150315612 SEQ ID NO: 71 |
| AAVhu.13 | 197 | US20150159173 SEQ ID NO: 32, US20150315612 SEQ ID NO: 129 |
| AAVhu.136.1 | 198 | US20150315612 SEQ ID NO: 165 |
| AAVhu.140.1 | 199 | US20150315612 SEQ ID NO: 166 |
| AAVhu.140.2 | 200 | US20150315612 SEQ ID NO: 167 |
| AAVhu.145.6 | 201 | US20150315612 SEQ ID No: 178 |
| AAVhu.15 | 202 | US20150315612 SEQ ID NO: 147 |
| AAVhu.15 (AAV33.4) | 203 | US20150315612 SEQ ID NO: 50 |
| AAVhu.156.1 | 204 | US20150315612 SEQ ID No: 179 |
| AAVhu.16 | 205 | US20150315612 SEQ ID NO: 148 |
| AAVhu.16 (AAV33.8) | 206 | US20150315612 SEQ ID NO: 51 |
| AAVhu.17 | 207 | US20150315612 SEQ ID NO: 83 |
| AAVhu.17 (AAV33.12) | 208 | US20150315612 SEQ ID NO: 4 |
| AAVhu.172.1 | 209 | US20150315612 SEQ ID NO: 171 |
| AAVhu.172.2 | 210 | US20150315612 SEQ ID NO: 172 |
| AAVhu.173.4 | 211 | US20150315612 SEQ ID NO: 173 |
| AAVhu.173.8 | 212 | US20150315612 SEQ ID NO: 175 |
| AAVhu.18 | 213 | US20150315612 SEQ ID NO: 52 |
| AAVhu.18 | 214 | US20150315612 SEQ ID NO: 149 |
| AAVhu.19 | 215 | US20150315612 SEQ ID NO: 62 |
| AAVhu.19 | 216 | US20150315612 SEQ ID NO: 133 |
| AAVhu.2 | 217 | US20150315612 SEQ ID NO: 48 |
| AAVhu.2 | 218 | US20150315612 SEQ ID NO: 143 |
| AAVhu.20 | 219 | US20150315612 SEQ ID NO: 63 |
| AAVhu.20 | 220 | US20150315612 SEQ ID NO: 134 |
| AAVhu.21 | 221 | US20150315612 SEQ ID NO: 65 |
| AAVhu.21 | 222 | US20150315612 SEQ ID NO: 135 |
| AAVhu.22 | 223 | US20150315612 SEQ ID NO: 67 |
| AAVhu.22 | 224 | US20150315612 SEQ ID NO: 138 |
| AAVhu.23 | 225 | US20150315612 SEQ ID NO: 60 |
| AAVhu.23.2 | 226 | US20150315612 SEQ ID NO: 137 |
| AAVhu.24 | 227 | US20150315612 SEQ ID NO: 66 |
| AAVhu.24 | 228 | US20150315612 SEQ ID NO: 136 |
| AAVhu.25 | 229 | US20150315612 SEQ ID NO: 49 |
| AAVhu.25 | 230 | US20150315612 SEQ ID NO: 146 |
| AAVhu.26 | 231 | US20150159173 SEQ ID NO: 17, US20150315612 SEQ ID NO: 61 |
| AAVhu.26 | 232 | US20150159173 SEQ ID NO: 33, US20150315612 SEQ ID NO: 139 |
| AAVhu.27 | 233 | US20150315612 SEQ ID NO: 64 |
| AAVhu.27 | 234 | US20150315612 SEQ ID NO: 140 |
| AAVhu.28 | 235 | US20150315612 SEQ ID NO: 68 |
| AAVhu.28 | 236 | US20150315612 SEQ ID NO: 130 |
| AAVhu.29 | 237 | US20150315612 SEQ ID NO: 69 |
| AAVhu.29 | 238 | US20150159173 SEQ ID NO: 42, US20150315612 SEQ ID NO: 132 |
| AAVhu.29 | 239 | US20150315612 SEQ ID NO: 225 |
| AAVhu.29R | 240 | US20150159173 |
| AAVhu.3 | 241 | US20150315612 SEQ ID NO: 44 |
| AAVhu.3 | 242 | US20150315612 SEQ ID NO: 145 |
| AAVhu.30 | 243 | US20150315612 SEQ ID NO: 70 |
| AAVhu.30 | 244 | US20150315612 SEQ ID NO: 131 |
| AAVhu.31 | 245 | US20150315612 SEQ ID NO: 1 |
| AAVhu.31 | 246 | US20150315612 SEQ ID NO: 121 |
| AAVhu.32 | 247 | US20150315612 SEQ ID NO: 2 |
| AAVhu.32 | 248 | US20150315612 SEQ ID NO: 122 |
| AAVhu.33 | 249 | US20150315612 SEQ ID NO: 75 |
| AAVhu.33 | 250 | US20150315612 SEQ ID NO: 124 |
| AAVhu.34 | 251 | US20150315612 SEQ ID NO: 72 |
| AAVhu.34 | 252 | US20150315612 SEQ ID NO: 125 |
| AAVhu.35 | 253 | US20150315612 SEQ ID NO: 73 |
| AAVhu.35 | 254 | US20150315612 SEQ ID NO: 164 |
| AAVhu.36 | 255 | US20150315612 SEQ ID NO: 74 |
| AAVhu.36 | 256 | US20150315612 SEQ ID NO: 126 |
| AAVhu.37 | 257 | US20150159173 SEQ ID NO: 34, US20150315612 SEQ ID NO: 88 |
| AAVhu.37 (AAV106.1) | 258 | US20150315612 SEQ ID NO: 10, US20150159173 SEQ ID NO: 18 |
| AAVhu.38 | 259 | US20150315612 SEQ ID NO: 161 |
| AAVhu.39 | 260 | US20150315612 SEQ ID NO: 102 |
| AAVhu.39 (AAVLG-9) | 261 | US20150315612 SEQ ID NO: 24 |
| AAVhu.4 | 262 | US20150315612 SEQ ID NO: 47 |
| AAVhu.4 | 263 | US20150315612 SEQ ID NO: 141 |
| AAVhu.40 | 264 | US20150315612 SEQ ID NO: 87 |
| AAVhu.40 (AAV114.3) | 265 | US20150315612 SEQ ID No: 11 |
| AAVhu.41 | 266 | US20150315612 SEQ ID NO: 91 |
| AAVhu.41 (AAV127.2) | 267 | US20150315612 SEQ ID NO: 6 |
| AAVhu.42 | 268 | US20150315612 SEQ ID NO: 85 |
| AAVhu.42 (AAV127.5) | 269 | US20150315612 SEQ ID NO: 8 |
| AAVhu.43 | 270 | US20150315612 SEQ ID NO: 160 |
| AAVhu.43 | 271 | US20150315612 SEQ ID NO: 236 |
| AAVhu.43 (AAV128.1) | 272 | US20150315612 SEQ ID NO: 80 |
| AAVhu.44 | 273 | US20150159173 SEQ ID NO: 45, US20150315612 SEQ ID NO: 158 |
| AAVhu.44 (AAV128.3) | 274 | US20150315612 SEQ ID NO: 81 |
| AAVhu.44R1 | 275 | US20150159173 |
| AAVhu.44R2 | 276 | US20150159173 |
| AAVhu.44R3 | 277 | US20150159173 |
| AAVhu.45 | 278 | US20150315612 SEQ ID NO: 76 |
| AAVhu.45 | 279 | US20150315612 SEQ ID NO: 127 |
| AAVhu.46 | 280 | US20150315612 SEQ ID NO: 82 |
| AAVhu.46 | 281 | US20150315612 SEQ ID NO: 159 |
| AAVhu.46 | 282 | US20150315612 SEQ ID NO: 224 |
| AAVhu.47 | 283 | US20150315612 SEQ ID NO: 77 |
| AAVhu.47 | 284 | US20150315612 SEQ ID NO: 128 |
| AAVhu.48 | 285 | US20150159173 SEQ ID NO: 38 |
| AAVhu.48 | 286 | US20150315612 SEQ ID NO: 157 |
| AAVhu.48 (AAV130.4) | 287 | US20150315612 SEQ ID NO: 78 |
| AAVhu.48R1 | 288 | US20150159173 |
| AAVhu.48R2 | 289 | US20150159173 |
| AAVhu.48R3 | 290 | US20150159173 |
| AAVhu.49 | 291 | US20150315612 SEQ ID NO: 209 |
| AAVhu.49 | 292 | US20150315612 SEQ ID NO: 189 |
| AAVhu.5 | 293 | US20150315612 SEQ ID NO: 45 |
| AAVhu.5 | 294 | US20150315612 SEQ ID NO: 142 |
| AAVhu.51 | 295 | US20150315612 SEQ ID NO: 208 |
| AAVhu.51 | 296 | US20150315612 SEQ ID NO: 190 |
| AAVhu.52 | 297 | US20150315612 SEQ ID NO: 210 |
| AAVhu.52 | 298 | US20150315612 SEQ ID NO: 191 |
| AAVhu.53 | 299 | US20150159173 SEQ ID NO: 19 |
| AAVhu.53 | 300 | US20150159173 SEQ ID NO: 35 |
| AAVhu.53 (AAV145.1) | 301 | US20150315612 SEQ ID NO: 176 |
| AAVhu.54 | 302 | US20150315612 SEQ ID NO: 188 |
| AAVhu.54 (AAV145.5) | 303 | US20150315612 SEQ ID No: 177 |
| AAVhu.55 | 304 | US20150315612 SEQ ID NO: 187 |
| AAVhu.56 | 305 | US20150315612 SEQ ID NO: 205 |
| AAVhu.56 (AAV145.6) | 306 | US20150315612 SEQ ID NO: 168 |
| AAVhu.56 (AAV145.6) | 307 | US20150315612 SEQ ID NO: 192 |
| AAVhu.57 | 308 | US20150315612 SEQ ID NO: 206 |
| AAVhu.57 | 309 | US20150315612 SEQ ID NO: 169 |
| AAVhu.57 | 310 | US20150315612 SEQ ID NO: 193 |
| AAVhu.58 | 311 | US20150315612 SEQ ID NO: 207 |
| AAVhu.58 | 312 | US20150315612 SEQ ID NO: 194 |
| AAVhu.6 (AAV3.1) | 313 | US20150315612 SEQ ID NO: 5 |
| AAVhu.6 (AAV3.1) | 314 | US20150315612 SEQ ID NO: 84 |
| AAVhu.60 | 315 | US20150315612 SEQ ID NO: 184 |
| AAVhu.60 (AAV161.10) | 316 | US20150315612 SEQ ID NO: 170 |
| AAVhu.61 | 317 | US20150315612 SEQ ID NO: 185 |
| AAVhu.61 (AAV161.6) | 318 | US20150315612 SEQ ID NO: 174 |
| AAVhu.63 | 319 | US20150315612 SEQ ID NO: 204 |
| AAVhu.63 | 320 | US20150315612 SEQ ID NO: 195 |
| AAVhu.64 | 321 | US20150315612 SEQ ID NO: 212 |
| AAVhu.64 | 322 | US20150315612 SEQ ID NO: 196 |
| AAVhu.66 | 323 | US20150315612 SEQ ID NO: 197 |
| AAVhu.67 | 324 | US20150315612 SEQ ID NO: 215 |
| AAVhu.67 | 325 | US20150315612 SEQ ID NO: 198 |
| AAVhu.7 | 326 | US20150315612 SEQ ID NO: 226 |
| AAVhu.7 | 327 | US20150315612 SEQ ID NO: 150 |
| AAVhu.7 (AAV7.3) | 328 | US20150315612 SEQ ID NO: 55 |
| AAVhu.71 | 329 | US20150315612 SEQ ID NO: 79 |
| AAVhu.8 | 330 | US20150315612 SEQ ID NO: 53 |
| AAVhu.8 | 331 | US20150315612 SEQ ID NO: 12 |
| AAVhu.8 | 332 | US20150315612 SEQ ID NO: 151 |
| AAVhu.9 (AAV3.1) | 333 | US20150315612 SEQ ID NO: 58 |
| AAVhu.9 (AAV3.1) | 334 | US20150315612 SEQ ID NO: 155 |
| AAV-LK01 | 335 | US20150376607 SEQ ID NO: 2 |
| AAV-LK01 | 336 | US20150376607 SEQ ID NO: 29 |
| AAV-LK02 | 337 | US20150376607 SEQ ID NO: 3 |
| AAV-LK02 | 338 | US20150376607 SEQ ID NO: 30 |
| AAV-LK03 | 339 | US20150376607 SEQ ID NO: 4 |
| AAV-LK03 | 340 | WO2015121501 SEQ ID NO: 12, US20150376607 SEQ ID NO: 31 |
| AAV-LK04 | 341 | US20150376607 SEQ ID NO: 5 |
| AAV-LK04 | 342 | US20150376607 SEQ ID NO: 32 |
| AAV-LK05 | 343 | US20150376607 SEQ ID NO: 6 |
| AAV-LK05 | 344 | US20150376607 SEQ ID NO: 33 |
| AAV-LK06 | 345 | US20150376607 SEQ ID NO: 7 |
| AAV-LK06 | 346 | US20150376607 SEQ ID NO: 34 |
| AAV-LK07 | 347 | US20150376607 SEQ ID NO: 8 |
| AAV-LK07 | 348 | US20150376607 SEQ ID NO: 35 |
| AAV-LK08 | 349 | US20150376607 SEQ ID NO: 9 |
| AAV-LK08 | 350 | US20150376607 SEQ ID NO: 36 |
| AAV-LK09 | 351 | US20150376607 SEQ ID NO: 10 |
| AAV-LK09 | 352 | US20150376607 SEQ ID NO: 37 |
| AAV-LK10 | 353 | US20150376607 SEQ ID NO: 11 |
| AAV-LK10 | 354 | US20150376607 SEQ ID NO: 38 |
| AAV-LK11 | 355 | US20150376607 SEQ ID NO: 12 |
| AAV-LK11 | 356 | US20150376607 SEQ ID NO: 39 |
| AAV-LK12 | 357 | US20150376607 SEQ ID NO: 13 |
| AAV-LK12 | 358 | US20150376607 SEQ ID NO: 40 |
| AAV-LK13 | 359 | US20150376607 SEQ ID NO: 14 |
| AAV-LK13 | 360 | US20150376607 SEQ ID NO: 41 |
| AAV-LK14 | 361 | US20150376607 SEQ ID NO: 15 |
| AAV-LK14 | 362 | US20150376607 SEQ ID NO: 42 |
| AAV-LK15 | 363 | US20150376607 SEQ ID NO: 16 |
| AAV-LK15 | 364 | US20150376607 SEQ ID NO: 43 |
| AAV-LK16 | 365 | US20150376607 SEQ ID NO: 17 |
| AAV-LK16 | 366 | US20150376607 SEQ ID NO: 44 |
| AAV-LK17 | 367 | US20150376607 SEQ ID NO: 18 |
| AAV-LK17 | 368 | US20150376607 SEQ ID NO: 45 |
| AAV-LK18 | 369 | US20150376607 SEQ ID NO: 19 |
| AAV-LK18 | 370 | US20150376607 SEQ ID NO: 46 |
| AAV-LK19 | 371 | US20150376607 SEQ ID NO: 20 |
| AAV-LK19 | 372 | US20150376607 SEQ ID NO: 47 |
| AAV-PAEC | 373 | US20150376607 SEQ ID NO: 1 |
| AAV-PAEC | 374 | US20150376607 SEQ ID NO: 48 |
| AAV-PAEC11 | 375 | US20150376607 SEQ ID NO: 26 |
| AAV-PAEC11 | 376 | US20150376607 SEQ ID NO: 54 |
| AAV-PAEC12 | 377 | US20150376607 SEQ ID NO: 27 |
| AAV-PAEC12 | 378 | US20150376607 SEQ ID NO: 51 |
| AAV-PAEC13 | 379 | US20150376607 SEQ ID NO: 28 |
| AAV-PAEC13 | 380 | US20150376607 SEQ ID NO: 49 |
| AAV-PAEC2 | 381 | US20150376607 SEQ ID NO: 21 |
| AAV-PAEC2 | 382 | US20150376607 SEQ ID NO: 56 |
| AAV-PAEC4 | 383 | US20150376607 SEQ ID NO: 22 |
| AAV-PAEC4 | 384 | US20150376607 SEQ ID NO: 55 |
| AAV-PAEC6 | 385 | US20150376607 SEQ ID NO: 23 |
| AAV-PAEC6 | 386 | US20150376607 SEQ ID NO: 52 |
| AAV-PAEC7 | 387 | US20150376607 SEQ ID NO: 24 |
| AAV-PAEC7 | 388 | US20150376607 SEQ ID NO: 53 |
| AAV-PAEC8 | 389 | US20150376607 SEQ ID NO: 25 |
| AAV-PAEC8 | 390 | US20150376607 SEQ ID NO: 50 |
| AAVpi.1 | 391 | US20150315612 SEQ ID NO: 28 |
| AAVpi.1 | 392 | US20150315612 SEQ ID NO: 93 |
| AAVpi.2 | 393 | US20150315612 SEQ ID NO: 30 |
| AAVpi.2 | 394 | US20150315612 SEQ ID NO: 95 |
| AAVpi.3 | 395 | US20150315612 SEQ ID NO: 29 |
| AAVpi.3 | 396 | US20150315612 SEQ ID NO: 94 |
| AAVrh.10 | 397 | US20150159173 SEQ ID NO: 9 |
| AAVrh.10 | 398 | US20150159173 SEQ ID NO: 25 |
| AAV44.2 | 399 | US20030138772 SEQ ID NO: 59 |
| AAVrh.10 (AAV44.2) | 400 | US20030138772 SEQ ID NO: 81 |
| AAV42.1B | 401 | US20030138772 SEQ ID NO: 90 |
| AAVrh.12 (AAV42.1b) | 402 | US20030138772 SEQ ID NO: 30 |
| AAVrh.13 | 403 | US20150159173 SEQ ID NO: 10 |
| AAVrh.13 | 404 | US20150159173 SEQ ID NO: 26 |
| AAVrh.13 | 405 | US20150315612 SEQ ID NO: 228 |
| AAVrh.13R | 406 | US20150159173 |
| AAV42.3A | 407 | US20030138772 SEQ ID NO: 87 |
| AAVrh.14 (AAV42.3a) | 408 | US20030138772 SEQ ID NO: 32 |
| AAV42.5A | 409 | US20030138772 SEQ ID NO: 89 |
| AAVrh.17 (AAV42.5a) | 410 | US20030138772 SEQ ID NO: 34 |
| AAV42.5B | 411 | US20030138772 SEQ ID NO: 91 |
| AAVrh.18 (AAV42.5b) | 412 | US20030138772 SEQ ID NO: 29 |
| AAV42.6B | 413 | US20030138772 SEQ ID NO: 112 |
| AAVrh.19 (AAV42.6b) | 414 | US20030138772 SEQ ID NO: 38 |
| AAVrh.2 | 415 | US20150159173 SEQ ID NO: 39 |
| AAVrh.2 | 416 | US20150315612 SEQ ID NO: 231 |
| AAVrh.20 | 417 | US20150159173 SEQ ID NO: 1 |
| AAV42.10 | 418 | US20030138772 SEQ ID NO: 106 |
| AAVrh.21 (AAV42.10) | 419 | US20030138772 SEQ ID NO: 35 |
| AAV42.11 | 420 | US20030138772 SEQ ID NO: 108 |
| AAVrh.22 (AAV42.11) | 421 | US20030138772 SEQ ID NO: 37 |
| AAV42.12 | 422 | US20030138772 SEQ ID NO: 113 |
| AAVrh.23 (AAV42.12) | 423 | US20030138772 SEQ ID NO: 58 |
| AAV42.13 | 424 | US20030138772 SEQ ID NO: 86 |
| AAVrh.24 (AAV42.13) | 425 | US20030138772 SEQ ID NO: 31 |
| AAV42.15 | 426 | US20030138772 SEQ ID NO: 84 |
| AAVrh.25 (AAV42.15) | 427 | US20030138772 SEQ ID NO: 28 |
| AAVrh.2R | 428 | US20150159173 |
| AAVrh.31 (AAV223.1) | 429 | US20030138772 SEQ ID NO: 48 |
| AAVC1 | 430 | US20030138772 SEQ ID NO: 60 |
| AAVrh.32 (AAVC1) | 431 | US20030138772 SEQ ID NO: 19 |
| AAVrh.32/33 | 432 | US20150159173 SEQ ID NO: 2 |
| AAVrh.33 (AAVC3) | 433 | US20030138772 SEQ ID NO: 20 |
| AAVC5 | 434 | US20030138772 SEQ ID NO: 62 |
| AAVrh.34 (AAVC5) | 435 | US20030138772 SEQ ID NO: 21 |
| AAVF1 | 436 | US20030138772 SEQ ID NO: 109 |
| AAVrh.35 (AAVF1) | 437 | US20030138772 SEQ ID NO: 22 |
| AAVF3 | 438 | US20030138772 SEQ ID NO: 111 |
| AAVrh.36 (AAVF3) | 439 | US20030138772 SEQ ID NO: 23 |
| AAVrh.37 | 440 | US20030138772 SEQ ID NO: 24 |
| AAVrh.37 | 441 | US20150159173 SEQ ID NO: 40 |
| AAVrh.37 | 442 | US20150315612 SEQ ID NO: 229 |
| AAVrh.37R2 | 443 | US20150159173 |
| AAVrh.38 (AAVLG-4) | 444 | US20150315612 SEQ ID NO: 7 |
| AAVrh.38 (AAVLG-4) | 445 | US20150315612 SEQ ID NO: 86 |
| AAVrh.39 | 446 | US20150159173 SEQ ID NO: 20, US20150315612 SEQ ID NO: 13 |
| AAVrh.39 | 447 | US20150159173 SEQ ID NO: 3, US20150159173 SEQ ID NO: 36, |
| | | US20150315612 SEQ ID NO: 89 |
| AAVrh.40 | 448 | US20150315612 SEQ ID NO: 92 |
| AAVrh.40 (AAVLG-10) | 449 | US20150315612 SEQ ID No: 14 |
| AAVrh.43 (AAVN721-8) | 450 | US20150315612 SEQ ID NO: 43, US20150159173 SEQ ID NO: 21 |
| AAVrh.43 (AAVN721-8) | 451 | US20150315612 SEQ ID NO: 163, US20150159173 SEQ ID NO: 37 |
| AAVrh.44 | 452 | US20150315612 SEQ ID NO: 34 |
| AAVrh.44 | 453 | US20150315612 SEQ ID NO: 111 |
| AAVrh.45 | 454 | US20150315612 SEQ ID NO: 41 |
| AAVrh.45 | 455 | US20150315612 SEQ ID NO: 109 |
| AAVrh.46 | 456 | US20150159173 SEQ ID NO: 22, US20150315612 SEQ ID NO: 19 |
| AAVrh.46 | 457 | US20150159173 SEQ ID NO: 4, US20150315612 SEQ ID NO: 101 |
| AAVrh.47 | 458 | US20150315612 SEQ ID NO: 38 |
| AAVrh.47 | 459 | US20150315612 SEQ ID NO: 118 |
| AAVrh.48 | 460 | US20150159173 SEQ ID NO: 44, US20150315612 SEQ ID NO: 115 |
| AAVrh.48.1 | 461 | US20150159173 |
| AAVrh.48.1.2 | 462 | US20150159173 |
| AAVrh.48.2 | 463 | US20150159173 |
| AAVrh.48 (AAV1-7) | 464 | US20150315612 SEQ ID NO: 32 |
| AAVrh.49 (AAV1-8) | 465 | US20150315612 SEQ ID NO: 25 |
| AAVrh.49 (AAV1-8) | 466 | US20150315612 SEQ ID NO: 103 |
| AAVrh.50 (AAV2-4) | 467 | US20150315612 SEQ ID NO: 23 |
| AAVrh.50 (AAV2-4) | 468 | US20150315612 SEQ ID NO: 108 |
| AAVrh.51 (AAV2-5) | 469 | US20150315612 SEQ ID No: 22 |
| AAVrh.51 (AAV2-5) | 470 | US20150315612 SEQ ID NO: 104 |
| AAVrh.52 (AAV3-9) | 471 | US20150315612 SEQ ID NO: 18 |
| AAVrh.52 (AAV3-9) | 472 | US20150315612 SEQ ID NO: 96 |
| AAVrh.53 | 473 | US20150315612 SEQ ID NO: 97 |
| AAVrh.53 (AAV3-11) | 474 | US20150315612 SEQ ID NO: 17 |
| AAVrh.53 (AAV3-11) | 475 | US20150315612 SEQ ID NO: 186 |
| AAVrh.54 | 476 | US20150315612 SEQ ID NO: 40 |
| AAVrh.54 | 477 | US20150159173 SEQ ID NO: 49, US20150315612 SEQ ID NO: 116 |
| AAVrh.55 | 478 | US20150315612 SEQ ID NO: 37 |
| AAVrh.55 (AAV4-19) | 479 | US20150315612 SEQ ID NO: 117 |
| AAVrh.56 | 480 | US20150315612 SEQ ID NO: 54 |
| AAVrh.56 | 481 | US20150315612 SEQ ID NO: 152 |
| AAVrh.57 | 482 | US20150315612 SEQ ID NO: 26 |
| AAVrh.57 | 483 | US20150315612 SEQ ID NO: 105 |
| AAVrh.58 | 484 | US20150315612 SEQ ID NO: 27 |
| AAVrh.58 | 485 | US20150159173 SEQ ID NO: 48, US20150315612 SEQ ID NO: 106 |
| AAVrh.58 | 486 | US20150315612 SEQ ID NO: 232 |
| AAVrh.59 | 487 | US20150315612 SEQ ID NO: 42 |
| AAVrh.59 | 488 | US20150315612 SEQ ID NO: 110 |
| AAVrh.60 | 489 | US20150315612 SEQ ID NO: 31 |
| AAVrh.60 | 490 | US20150315612 SEQ ID NO: 120 |
| AAVrh.61 | 491 | US20150315612 SEQ ID NO: 107 |
| AAVrh.61 (AAV2-3) | 492 | US20150315612 SEQ ID NO: 21 |
| AAVrh.62 (AAV2-15) | 493 | US20150315612 SEQ ID No: 33 |
| AAVrh.62 (AAV2-15) | 494 | US20150315612 SEQ ID NO: 114 |
| AAVrh.64 | 495 | US20150315612 SEQ ID No: 15 |
| AAVrh.64 | 496 | US20150159173 SEQ ID NO: 43, US20150315612 SEQ ID NO: 99 |
| AAVrh.64 | 497 | US20150315612 SEQ ID NO: 233 |
| AAVRh.64R1 | 498 | US20150159173 |
| AAVRh.64R2 | 499 | US20150159173 |
| AAVrh.65 | 500 | US20150315612 SEQ ID NO: 35 |
| AAVrh.65 | 501 | US20150315612 SEQ ID NO: 112 |
| AAVrh.67 | 502 | US20150315612 SEQ ID NO: 36 |
| AAVrh.67 | 503 | US20150315612 SEQ ID NO: 230 |
| AAVrh.67 | 504 | US20150159173 SEQ ID NO: 47, US20150315612 SEQ ID NO: 113 |
| AAVrh.68 | 505 | US20150315612 SEQ ID NO: 16 |
| AAVrh.68 | 506 | US20150315612 SEQ ID NO: 100 |
| AAVrh.69 | 507 | US20150315612 SEQ ID NO: 39 |
| AAVrh.69 | 508 | US20150315612 SEQ ID NO: 119 |
| AAVrh.70 | 509 | US20150315612 SEQ ID NO: 20 |
| AAVrh.70 | 510 | US20150315612 SEQ ID NO: 98 |
| AAVrh.71 | 511 | US20150315612 SEQ ID NO: 162 |
| AAVrh.72 | 512 | US20150315612 SEQ ID NO: 9 |
| AAVrh.73 | 513 | US20150159173 SEQ ID NO: 5 |
| AAVrh.74 | 514 | US20150159173 SEQ ID NO: 6 |
| AAVrh.8 | 515 | US20150159173 SEQ ID NO: 41 |
| AAVrh.8 | 516 | US20150315612 SEQ ID NO: 235 |
| AAVrh.8R | 517 | US20150159173, WO2015168666 SEQ ID NO: 9 |
| AAVrh.8R A586R mutant | 518 | WO2015168666 SEQ ID NO: 10 |
| AAVrh.8R R533A mutant | 519 | WO2015168666 SEQ ID NO: 11 |
| BAAV (bovine AAV) | 520 | U.S. Pat. No. 9,193,769 SEQ ID NO: 8 |
| BAAV (bovine AAV) | 521 | U.S. Pat. No. 9,193,769 SEQ ID NO: 10 |
| BAAV (bovine AAV) | 522 | U.S. Pat. No. 9,193,769 SEQ ID NO: 4 |
| BAAV (bovine AAV) | 523 | U.S. Pat. No. 9,193,769 SEQ ID NO: 2 |
| BAAV (bovine AAV) | 524 | U.S. Pat. No. 9,193,769 SEQ ID NO: 6 |
| BAAV (bovine AAV) | 525 | U.S. Pat. No. 9,193,769 SEQ ID NO: 1 |
| BAAV (bovine AAV) | 526 | U.S. Pat. No. 9,193,769 SEQ ID NO: 5 |
| BAAV (bovine AAV) | 527 | U.S. Pat. No. 9,193,769 SEQ ID NO: 3 |
| BAAV (bovine AAV) | 528 | U.S. Pat. No. 9,193,769 SEQ ID NO: 11 |
| BAAV (bovine AAV) | 529 | U.S. Pat. No. 7,427,396 SEQ ID NO: 5 |
| BAAV (bovine AAV) | 530 | U.S. Pat. No. 7,427,396 SEQ ID NO: 6 |
| BAAV (bovine AAV) | 531 | U.S. Pat. No. 9,193,769 SEQ ID NO: 7 |
| BAAV (bovine AAV) | 532 | U.S. Pat. No. 9,193,769 SEQ ID NO: 9 |
| BNP61 AAV | 533 | US20150238550 SEQ ID NO: 1 |
| BNP61 AAV | 534 | US20150238550 SEQ ID NO: 2 |
| BNP62 AAV | 535 | US20150238550 SEQ ID NO: 3 |
| BNP63 AAV | 536 | US20150238550 SEQ ID NO: 4 |
| caprine AAV | 537 | U.S. Pat. No. 7,427,396 SEQ ID NO: 3 |
| caprine AAV | 538 | U.S. Pat. No. 7,427,396 SEQ ID NO: 4 |
| true type AAV (ttAAV) | 539 | WO2015121501 SEQ ID NO: 2 |
| AAAV (Avian AAV) | 540 | U.S. Pat. No. 9,238,800 SEQ ID NO: 12 |
| AAAV (Avian AAV) | 541 | U.S. Pat. No. 9,238,800 SEQ ID NO: 2 |
| AAAV (Avian AAV) | 542 | U.S. Pat. No. 9,238,800 SEQ ID NO: 6 |
| AAAV (Avian AAV) | 543 | U.S. Pat. No. 9,238,800 SEQ ID NO: 4 |
| AAAV (Avian AAV) | 544 | U.S. Pat. No. 9,238,800 SEQ ID NO: 8 |
| AAAV (Avian AAV) | 545 | U.S. Pat. No. 9,238,800 SEQ ID NO: 14 |
| AAAV (Avian AAV) | 546 | U.S. Pat. No. 9,238,800 SEQ ID NO: 10 |
| AAAV (Avian AAV) | 547 | U.S. Pat. No. 9,238,800 SEQ ID NO: 15 |
| AAAV (Avian AAV) | 548 | U.S. Pat. No. 9,238,800 SEQ ID NO: 5 |
| AAAV (Avian AAV) | 549 | U.S. Pat. No. 9,238,800 SEQ ID NO: 9 |
| AAAV (Avian AAV) | 550 | U.S. Pat. No. 9,238,800 SEQ ID NO: 3 |
| AAAV (Avian AAV) | 551 | U.S. Pat. No. 9,238,800 SEQ ID NO: 7 |
| AAAV (Avian AAV) | 552 | U.S. Pat. No. 9,238,800 SEQ ID NO: 11 |
| AAAV (Avian AAV) | 553 | U.S. Pat. No. 9,238,800 SEQ ID NO: 13 |
| AAAV (Avian AAV) | 554 | U.S. Pat. No. 9,238,800 SEQ ID NO: 1 |
| AAV Shuffle 100-1 | 555 | US20160017295 SEQ ID NO: 23 |
| AAV Shuffle 100-1 | 556 | US20160017295 SEQ ID NO: 11 |
| AAV Shuffle 100-2 | 557 | US20160017295 SEQ ID NO: 37 |
| AAV Shuffle 100-2 | 558 | US20160017295 SEQ ID NO: 29 |
| AAV Shuffle 100-3 | 559 | US20160017295 SEQ ID NO: 24 |
| AAV Shuffle 100-3 | 560 | US20160017295 SEQ ID NO: 12 |
| AAV Shuffle 100-7 | 561 | US20160017295 SEQ ID NO: 25 |
| AAV Shuffle 100-7 | 562 | US20160017295 SEQ ID NO: 13 |
| AAV Shuffle 10-2 | 563 | US20160017295 SEQ ID NO: 34 |
| AAV Shuffle 10-2 | 564 | US20160017295 SEQ ID NO: 26 |
| AAV Shuffle 10-6 | 565 | US20160017295 SEQ ID NO: 35 |
| AAV Shuffle 10-6 | 566 | US20160017295 SEQ ID NO: 27 |
| AAV Shuffle 10-8 | 567 | US20160017295 SEQ ID NO: 36 |
| AAV Shuffle 10-8 | 568 | US20160017295 SEQ ID NO: 28 |
| AAV SM 100-10 | 569 | US20160017295 SEQ ID NO: 41 |
| AAV SM 100-10 | 570 | US20160017295 SEQ ID NO: 33 |
| AAV SM 100-3 | 571 | US20160017295 SEQ ID NO: 40 |
| AAV SM 100-3 | 572 | US20160017295 SEQ ID NO: 32 |
| AAV SM 10-1 | 573 | US20160017295 SEQ ID NO: 38 |
| AAV SM 10-1 | 574 | US20160017295 SEQ ID NO: 30 |
| AAV SM 10-2 | 575 | US20160017295 SEQ ID NO: 10 |
| AAV SM 10-2 | 576 | US20160017295 SEQ ID NO: 22 |
| AAV SM 10-8 | 577 | US20160017295 SEQ ID NO: 39 |
| AAV SM 10-8 | 578 | US20160017295 SEQ ID NO: 31 |
| AAVF1/HSC1 | 579 | WO2016049230 SEQ ID NO: 20 |
| AAVF2/HSC2 | 580 | WO2016049230 SEQ ID NO: 21 |
| AAVF3/HSC3 | 581 | WO2016049230 SEQ ID NO: 22 |
| AAVF4/HSC4 | 582 | WO2016049230 SEQ ID NO: 23 |
| AAVF5/HSC5 | 583 | WO2016049230 SEQ ID NO: 25 |
| AAVF6/HSC6 | 584 | WO2016049230 SEQ ID NO: 24 |
| AAVF7/HSC7 | 585 | WO2016049230 SEQ ID NO: 27 |
| AAVF8/HSC8 | 586 | WO2016049230 SEQ ID NO: 28 |
| AAVF9/HSC9 | 587 | WO2016049230 SEQ ID NO: 29 |
| AAVF11/HSC11 | 588 | WO2016049230 SEQ ID NO: 26 |
| AAVF12/HSC12 | 589 | WO2016049230 SEQ ID NO: 30 |
| AAVF13/HSC13 | 590 | WO2016049230 SEQ ID NO: 31 |
| AAVF14/HSC14 | 591 | WO2016049230 SEQ ID NO: 32 |
| AAVF15/HSC15 | 592 | WO2016049230 SEQ ID NO: 33 |
| AAVF16/HSC16 | 593 | WO2016049230 SEQ ID NO: 34 |
| AAVF17/HSC17 | 594 | WO2016049230 SEQ ID NO: 35 |
| AAVF1/HSC1 | 595 | WO2016049230 SEQ ID NO: 2 |
| AAVF2/HSC2 | 596 | WO2016049230 SEQ ID NO: 3 |
| AAVF3/HSC3 | 597 | WO2016049230 SEQ ID NO: 5 |
| AAVF4/HSC4 | 598 | WO2016049230 SEQ ID NO: 6 |
| AAVF5/HSC5 | 599 | WO2016049230 SEQ ID NO: 11 |
| AAVF6/HSC6 | 600 | WO2016049230 SEQ ID NO: 7 |
| AAVF7/HSC7 | 601 | WO2016049230 SEQ ID NO: 8 |
| AAVF8/HSC8 | 602 | WO2016049230 SEQ ID NO: 9 |
| AAVF9/HSC9 | 603 | WO2016049230 SEQ ID NO: 10 |
| AAVF11/HSC11 | 604 | WO2016049230 SEQ ID NO: 4 |
| AAVF12/HSC12 | 605 | WO2016049230 SEQ ID NO: 12 |
| AAVF13/HSC13 | 606 | WO2016049230 SEQ ID NO: 14 |
| AAVF14/HSC14 | 607 | WO2016049230 SEQ ID NO: 15 |
| AAVF15/HSC15 | 608 | WO2016049230 SEQ ID NO: 16 |
| AAVF16/HSC16 | 609 | WO2016049230 SEQ ID NO: 17 |
| AAVF17/HSC17 | 610 | WO2016049230 SEQ ID NO: 13 |
| AAV CBr-E1 | 611 | U.S. Pat. No. 8,734,809 SEQ ID NO: 13 |
| AAV CBr-E2 | 612 | U.S. Pat. No. 8,734,809 SEQ ID NO: 14 |
| AAV CBr-E3 | 613 | U.S. Pat. No. 8,734,809 SEQ ID NO: 15 |
| AAV CBr-E4 | 614 | U.S. Pat. No. 8,734,809 SEQ ID NO: 16 |
| AAV CBr-E5 | 615 | U.S. Pat. No. 8,734,809 SEQ ID NO: 17 |
| AAV CBr-e5 | 616 | U.S. Pat. No. 8,734,809 SEQ ID NO: 18 |
| AAV CBr-E6 | 617 | U.S. Pat. No. 8,734,809 SEQ ID NO: 19 |
| AAV CBr-E7 | 618 | U.S. Pat. No. 8,734,809 SEQ ID NO: 20 |
| AAV CBr-E8 | 619 | U.S. Pat. No. 8,734,809 SEQ ID NO: 21 |
| AAV CLv-D1 | 620 | U.S. Pat. No. 8,734,809 SEQ ID NO: 22 |
| AAV CLv-D2 | 621 | U.S. Pat. No. 8,734,809 SEQ ID NO: 23 |
| AAV CLv-D3 | 622 | U.S. Pat. No. 8,734,809 SEQ ID NO: 24 |
| AAV CLv-D4 | 623 | U.S. Pat. No. 8,734,809 SEQ ID NO: 25 |
| AAV CLv-D5 | 624 | U.S. Pat. No. 8,734,809 SEQ ID NO: 26 |
| AAV CLv-D6 | 625 | U.S. Pat. No. 8,734,809 SEQ ID NO: 27 |
| AAV CLv-D7 | 626 | U.S. Pat. No. 8,734,809 SEQ ID NO: 28 |
| AAV CLv-D8 | 627 | U.S. Pat. No. 8,734,809 SEQ ID NO: 29 |
| AAV CLv-E1 | 628 | U.S. Pat. No. 8,734,809 SEQ ID NO: 13 |
| AAV CLv-R1 | 629 | U.S. Pat. No. 8,734,809 SEQ ID NO: 30 |
| AAV CLv-R2 | 630 | U.S. Pat. No. 8,734,809 SEQ ID NO: 31 |
| AAV CLv-R3 | 631 | U.S. Pat. No. 8,734,809 SEQ ID NO: 32 |
| AAV CLv-R4 | 632 | U.S. Pat. No. 8,734,809 SEQ ID NO: 33 |
| AAV CLv-R5 | 633 | U.S. Pat. No. 8,734,809 SEQ ID NO: 34 |
| AAV CLv-R6 | 634 | U.S. Pat. No. 8,734,809 SEQ ID NO: 35 |
| AAV CLv-R7 | 635 | U.S. Pat. No. 8,734,809 SEQ ID NO: 36 |
| AAV CLv-R8 | 636 | U.S. Pat. No. 8,734,809 SEQ ID NO: 37 |
| AAV CLv-R9 | 637 | U.S. Pat. No. 8,734,809 SEQ ID NO: 38 |
| AAV CLg-F1 | 638 | U.S. Pat. No. 8,734,809 SEQ ID NO: 39 |
| AAV CLg-F2 | 639 | U.S. Pat. No. 8,734,809 SEQ ID NO: 40 |
| AAV CLg-F3 | 640 | U.S. Pat. No. 8,734,809 SEQ ID NO: 41 |
| AAV CLg-F4 | 641 | U.S. Pat. No. 8,734,809 SEQ ID NO: 42 |
| AAV CLg-F5 | 642 | U.S. Pat. No. 8,734,809 SEQ ID NO: 43 |
| AAV CLg-F6 | 643 | U.S. Pat. No. 8,734,809 SEQ ID NO: 43 |
| AAV CLg-F7 | 644 | U.S. Pat. No. 8,734,809 SEQ ID NO: 44 |
| AAV CLg-F8 | 645 | U.S. Pat. No. 8,734,809 SEQ ID NO: 43 |
| AAV CSp-1 | 646 | U.S. Pat. No. 8,734,809 SEQ ID NO: 45 |
| AAV CSp-10 | 647 | U.S. Pat. No. 8,734,809 SEQ ID NO: 46 |
| AAV CSp-11 | 648 | U.S. Pat. No. 8,734,809 SEQ ID NO: 47 |
| AAV CSp-2 | 649 | U.S. Pat. No. 8,734,809 SEQ ID NO: 48 |
| AAV CSp-3 | 650 | U.S. Pat. No. 8,734,809 SEQ ID NO: 49 |
| AAV CSp-4 | 651 | U.S. Pat. No. 8,734,809 SEQ ID NO: 50 |
| AAV CSp-6 | 652 | U.S. Pat. No. 8,734,809 SEQ ID NO: 51 |
| AAV CSp-7 | 653 | U.S. Pat. No. 8,734,809 SEQ ID NO: 52 |
| AAV CSp-8 | 654 | U.S. Pat. No. 8,734,809 SEQ ID NO: 53 |
| AAV CSp-9 | 655 | U.S. Pat. No. 8,734,809 SEQ ID NO: 54 |
| AAV CHt-2 | 656 | U.S. Pat. No. 8,734,809 SEQ ID NO: 55 |
| AAV CHt-3 | 657 | U.S. Pat. No. 8,734,809 SEQ ID NO: 56 |
| AAV CKd-1 | 658 | U.S. Pat. No. 8,734,809 SEQ ID NO: 57 |
| AAV CKd-10 | 659 | U.S. Pat. No. 8,734,809 SEQ ID NO: 58 |
| AAV CKd-2 | 660 | U.S. Pat. No. 8,734,809 SEQ ID NO: 59 |
| AAV CKd-3 | 661 | U.S. Pat. No. 8,734,809 SEQ ID NO: 60 |
| AAV CKd-4 | 662 | U.S. Pat. No. 8,734,809 SEQ ID NO: 61 |
| AAV CKd-6 | 663 | U.S. Pat. No. 8,734,809 SEQ ID NO: 62 |
| AAV CKd-7 | 664 | U.S. Pat. No. 8,734,809 SEQ ID NO: 63 |
| AAV CKd-8 | 665 | U.S. Pat. No. 8,734,809 SEQ ID NO: 64 |
| AAV CLv-1 | 666 | U.S. Pat. No. 8,734,809 SEQ ID NO: 65 |
| AAV CLv-12 | 667 | U.S. Pat. No. 8,734,809 SEQ ID NO: 66 |
| AAV CLv-13 | 668 | U.S. Pat. No. 8,734,809 SEQ ID NO: 67 |
| AAV CLv-2 | 669 | U.S. Pat. No. 8,734,809 SEQ ID NO: 68 |
| AAV CLv-3 | 670 | U.S. Pat. No. 8,734,809 SEQ ID NO: 69 |
| AAV CLv-4 | 671 | U.S. Pat. No. 8,734,809 SEQ ID NO: 70 |
| AAV CLv-6 | 672 | U.S. Pat. No. 8,734,809 SEQ ID NO: 71 |
| AAV CLv-8 | 673 | U.S. Pat. No. 8,734,809 SEQ ID NO: 72 |
| AAV CKd-B1 | 674 | U.S. Pat. No. 8,734,809 SEQ ID NO: 73 |
| AAV CKd-B2 | 675 | U.S. Pat. No. 8,734,809 SEQ ID NO: 74 |
| AAV CKd-B3 | 676 | U.S. Pat. No. 8,734,809 SEQ ID NO: 75 |
| AAV CKd-B4 | 677 | U.S. Pat. No. 8,734,809 SEQ ID NO: 76 |
| AAV CKd-B5 | 678 | U.S. Pat. No. 8,734,809 SEQ ID NO: 77 |
| AAV CKd-B6 | 679 | U.S. Pat. No. 8,734,809 SEQ ID NO: 78 |
| AAV CKd-B7 | 680 | U.S. Pat. No. 8,734,809 SEQ ID NO: 79 |
| AAV CKd-B8 | 681 | U.S. Pat. No. 8,734,809 SEQ ID NO: 80 |
| AAV CKd-H1 | 682 | U.S. Pat. No. 8,734,809 SEQ ID NO: 81 |
| AAV CKd-H2 | 683 | U.S. Pat. No. 8,734,809 SEQ ID NO: 82 |
| AAV CKd-H3 | 684 | U.S. Pat. No. 8,734,809 SEQ ID NO: 83 |
| AAV CKd-H4 | 685 | U.S. Pat. No. 8,734,809 SEQ ID NO: 84 |
| AAV CKd-H5 | 686 | U.S. Pat. No. 8,734,809 SEQ ID NO: 85 |
| AAV CKd-H6 | 687 | U.S. Pat. No. 8,734,809 SEQ ID NO: 77 |
| AAV CHt-1 | 688 | U.S. Pat. No. 8,734,809 SEQ ID NO: 86 |
| AAV CLvl-1 | 689 | U.S. Pat. No. 8,734,809 SEQ ID NO: 171 |
| AAV CLv1-2 | 690 | U.S. Pat. No. 8,734,809 SEQ ID NO: 172 |
| AAV CLv1-3 | 691 | U.S. Pat. No. 8,734,809 SEQ ID NO: 173 |
| AAV CLv1-4 | 692 | U.S. Pat. No. 8,734,809 SEQ ID NO: 174 |
| AAV Clv1-7 | 693 | U.S. Pat. No. 8,734,809 SEQ ID NO: 175 |
| AAV Clv1-8 | 694 | U.S. Pat. No. 8,734,809 SEQ ID NO: 176 |
| AAV Clv1-9 | 695 | U.S. Pat. No. 8,734,809 SEQ ID NO: 177 |
| AAV Clv1-10 | 696 | U.S. Pat. No. 8,734,809 SEQ ID NO: 178 |
| AAV.VR-355 | 697 | U.S. Pat. No. 8,734,809 SEQ ID NO: 181 |
| AAV.hu.48R3 | 698 | U.S. Pat. No. 8,734,809 SEQ ID NO: 183 |
| AAV CBr-E1 | 699 | U.S. Pat. No. 8,734,809 SEQ ID NO: 87 |
| AAV CBr-E2 | 700 | U.S. Pat. No. 8,734,809 SEQ ID NO: 88 |
| AAV CBr-E3 | 701 | U.S. Pat. No. 8,734,809 SEQ ID NO: 89 |
| AAV CBr-E4 | 702 | U.S. Pat. No. 8,734,809 SEQ ID NO: 90 |
| AAV CBr-E5 | 703 | U.S. Pat. No. 8,734,809 SEQ ID NO: 91 |
| AAV CBr-e5 | 704 | U.S. Pat. No. 8,734,809 SEQ ID NO: 92 |
| AAV CBr-E6 | 705 | U.S. Pat. No. 8,734,809 SEQ ID NO: 93 |
| AAV CBr-E7 | 706 | U.S. Pat. No. 8,734,809 SEQ ID NO: 94 |
| AAV CBr-E8 | 707 | U.S. Pat. No. 8,734,809 SEQ ID NO: 95 |
| AAV CLv-D1 | 708 | U.S. Pat. No. 8,734,809 SEQ ID NO: 96 |
| AAV CLv-D2 | 709 | U.S. Pat. No. 8,734,809 SEQ ID NO: 97 |
| AAV CLv-D3 | 710 | U.S. Pat. No. 8,734,809 SEQ ID NO: 98 |
| AAV CLv-D4 | 711 | U.S. Pat. No. 8,734,809 SEQ ID NO: 99 |
| AAV CLv-D5 | 712 | U.S. Pat. No. 8,734,809 SEQ ID NO: 100 |
| AAV CLv-D6 | 713 | U.S. Pat. No. 8,734,809 SEQ ID NO: 101 |
| AAV CLv-D7 | 714 | U.S. Pat. No. 8,734,809 SEQ ID NO: 102 |
| AAV CLv-D8 | 715 | U.S. Pat. No. 8,734,809 SEQ ID NO: 103 |
| AAV CLv-E1 | 716 | U.S. Pat. No. 8,734,809 SEQ ID NO: 87 |
| AAV CLv-R1 | 717 | U.S. Pat. No. 8,734,809 SEQ ID NO: 104 |
| AAV CLv-R2 | 718 | U.S. Pat. No. 8,734,809 SEQ ID NO: 105 |
| AAV CLv-R3 | 719 | U.S. Pat. No. 8,734,809 SEQ ID NO: 106 |
| AAV CLv-R4 | 720 | U.S. Pat. No. 8,734,809 SEQ ID NO: 107 |
| AAV CLv-R5 | 721 | U.S. Pat. No. 8,734,809 SEQ ID NO: 108 |
| AAV CLv-R6 | 722 | U.S. Pat. No. 8,734,809 SEQ ID NO: 109 |
| AAV CLv-R7 | 723 | U.S. Pat. No. 8,734,809 SEQ ID NO: 110 |
| AAV CLv-R8 | 724 | U.S. Pat. No. 8,734,809 SEQ ID NO: 111 |
| AAV CLv-R9 | 725 | U.S. Pat. No. 8,734,809 SEQ ID NO: 112 |
| AAV CLg-F1 | 726 | U.S. Pat. No. 8,734,809 SEQ ID NO: 113 |
| AAV CLg-F2 | 727 | U.S. Pat. No. 8,734,809 SEQ ID NO: 114 |
| AAV CLg-F3 | 728 | U.S. Pat. No. 8,734,809 SEQ ID NO: 115 |
| AAV CLg-F4 | 729 | U.S. Pat. No. 8,734,809 SEQ ID NO: 116 |
| AAV CLg-F5 | 730 | U.S. Pat. No. 8,734,809 SEQ ID NO: 117 |
| AAV CLg-F6 | 731 | U.S. Pat. No. 8,734,809 SEQ ID NO: 117 |
| AAV CLg-F7 | 732 | U.S. Pat. No. 8,734,809 SEQ ID NO: 118 |
| AAV CLg-F8 | 733 | U.S. Pat. No. 8,734,809 SEQ ID NO: 117 |
| AAV CSp-1 | 734 | U.S. Pat. No. 8,734,809 SEQ ID NO: 119 |
| AAV CSp-10 | 735 | U.S. Pat. No. 8,734,809 SEQ ID NO: 120 |
| AAV CSp-11 | 736 | U.S. Pat. No. 8,734,809 SEQ ID NO: 121 |
| AAV CSp-2 | 737 | U.S. Pat. No. 8,734,809 SEQ ID NO: 122 |
| AAV CSp-3 | 738 | U.S. Pat. No. 8,734,809 SEQ ID NO: 123 |
| AAV CSp-4 | 739 | U.S. Pat. No. 8,734,809 SEQ ID NO: 124 |
| AAV CSp-6 | 740 | U.S. Pat. No. 8,734,809 SEQ ID NO: 125 |
| AAV CSp-7 | 741 | U.S. Pat. No. 8,734,809 SEQ ID NO: 126 |
| AAV CSp-8 | 742 | U.S. Pat. No. 8,734,809 SEQ ID NO: 127 |
| AAV CSp-9 | 743 | U.S. Pat. No. 8,734,809 SEQ ID NO: 128 |
| AAV CHt-2 | 744 | U.S. Pat. No. 8,734,809 SEQ ID NO: 129 |
| AAV CHt-3 | 745 | U.S. Pat. No. 8,734,809 SEQ ID NO: 130 |
| AAV CKd-1 | 746 | U.S. Pat. No. 8,734,809 SEQ ID NO: 131 |
| AAV CKd-10 | 747 | U.S. Pat. No. 8,734,809 SEQ ID NO: 132 |
| AAV CKd-2 | 748 | U.S. Pat. No. 8,734,809 SEQ ID NO: 133 |
| AAV CKd-3 | 749 | U.S. Pat. No. 8,734,809 SEQ ID NO: 134 |
| AAV CKd-4 | 750 | U.S. Pat. No. 8,734,809 SEQ ID NO: 135 |
| AAV CKd-6 | 751 | U.S. Pat. No. 8,734,809 SEQ ID NO: 136 |
| AAV CKd-7 | 752 | U.S. Pat. No. 8,734,809 SEQ ID NO: 137 |
| AAV CKd-8 | 753 | U.S. Pat. No. 8,734,809 SEQ ID NO: 138 |
| AAV CLv-1 | 754 | U.S. Pat. No. 8,734,809 SEQ ID NO: 139 |
| AAV CLv-12 | 755 | U.S. Pat. No. 8,734,809 SEQ ID NO: 140 |
| AAV CLv-13 | 756 | U.S. Pat. No. 8,734,809 SEQ ID NO: 141 |
| AAV CLv-2 | 757 | U.S. Pat. No. 8,734,809 SEQ ID NO: 142 |
| AAV CLv-3 | 758 | U.S. Pat. No. 8,734,809 SEQ ID NO: 143 |
| AAV CLv-4 | 759 | U.S. Pat. No. 8,734,809 SEQ ID NO: 144 |
| AAV CLv-6 | 760 | U.S. Pat. No. 8,734,809 SEQ ID NO: 145 |
| AAV CLv-8 | 761 | U.S. Pat. No. 8,734,809 SEQ ID NO: 146 |
| AAV CKd-B1 | 762 | U.S. Pat. No. 8,734,809 SEQ ID NO: 147 |
| AAV CKd-B2 | 763 | U.S. Pat. No. 8,734,809 SEQ ID NO: 148 |
| AAV CKd-B3 | 764 | U.S. Pat. No. 8,734,809 SEQ ID NO: 149 |
| AAV CKd-B4 | 765 | U.S. Pat. No. 8,734,809 SEQ ID NO: 150 |
| AAV CKd-B5 | 766 | U.S. Pat. No. 8,734,809 SEQ ID NO: 151 |
| AAV CKd-B6 | 767 | U.S. Pat. No. 8,734,809 SEQ ID NO: 152 |
| AAV CKd-B7 | 768 | U.S. Pat. No. 8,734,809 SEQ ID NO: 153 |
| AAV CKd-B8 | 769 | U.S. Pat. No. 8,734,809 SEQ ID NO: 154 |
| AAV CKd-H1 | 770 | U.S. Pat. No. 8,734,809 SEQ ID NO: 155 |
| AAV CKd-H2 | 771 | U.S. Pat. No. 8,734,809 SEQ ID NO: 156 |
| AAV CKd-H3 | 772 | U.S. Pat. No. 8,734,809 SEQ ID NO: 157 |
| AAV CKd-H4 | 773 | U.S. Pat. No. 8,734,809 SEQ ID NO: 158 |
| AAV CKd-H5 | 774 | U.S. Pat. No. 8,734,809 SEQ ID NO: 159 |
| AAV CKd-H6 | 775 | U.S. Pat. No. 8,734,809 SEQ ID NO: 151 |
| AAV CHt-1 | 776 | U.S. Pat. No. 8,734,809 SEQ ID NO: 160 |
| AAV CHt-P2 | 777 | WO2016065001 SEQ ID NO: 1 |
| AAV CHt-P5 | 778 | WO2016065001 SEQ ID NO: 2 |
| AAV CHt-P9 | 779 | WO2016065001 SEQ ID NO: 3 |
| AAV CBr-7.1 | 780 | WO2016065001 SEQ ID NO: 4 |
| AAV CBr-7.2 | 781 | WO2016065001 SEQ ID NO: 5 |
| AAV CBr-7.3 | 782 | WO2016065001 SEQ ID NO: 6 |
| AAV CBr-7.4 | 783 | WO2016065001 SEQ ID NO: 7 |
| AAV CBr-7.5 | 784 | WO2016065001 SEQ ID NO: 8 |
| AAV CBr-7.7 | 785 | WO2016065001 SEQ ID NO: 9 |
| AAV CBr-7.8 | 786 | WO2016065001 SEQ ID NO: 10 |
| AAV CBr-7.10 | 787 | WO2016065001 SEQ ID NO: 11 |
| AAV CKd-N3 | 788 | WO2016065001 SEQ ID NO: 12 |
| AAV CKd-N4 | 789 | WO2016065001 SEQ ID NO: 13 |
| AAV CKd-N9 | 790 | WO2016065001 SEQ ID NO: 14 |
| AAV CLv-L4 | 791 | WO2016065001 SEQ ID NO: 15 |
| AAV CLv-L5 | 792 | WO2016065001 SEQ ID NO: 16 |
| AAV CLv-L6 | 793 | WO2016065001 SEQ ID NO: 17 |
| AAV CLv-K1 | 794 | WO2016065001 SEQ ID NO: 18 |
| AAV CLv-K3 | 795 | WO2016065001 SEQ ID NO: 19 |
| AAV CLv-K6 | 796 | WO2016065001 SEQ ID NO: 20 |
| AAV CLv-M1 | 797 | WO2016065001 SEQ ID NO: 21 |
| AAV CLv-M11 | 798 | WO2016065001 SEQ ID NO: 22 |
| AAV CLv-M2 | 799 | WO2016065001 SEQ ID NO: 23 |
| AAV CLv-M5 | 800 | WO2016065001 SEQ ID NO: 24 |
| AAV CLv-M6 | 801 | WO2016065001 SEQ ID NO: 25 |
| AAV CLv-M7 | 802 | WO2016065001 SEQ ID NO: 26 |
| AAV CLv-M8 | 803 | WO2016065001 SEQ ID NO: 27 |
| AAV CLv-M9 | 804 | WO2016065001 SEQ ID NO: 28 |
| AAV CHt-P1 | 805 | WO2016065001 SEQ ID NO: 29 |
| AAV CHt-P6 | 806 | WO2016065001 SEQ ID NO: 30 |
| AAV CHt-P8 | 807 | WO2016065001 SEQ ID NO: 31 |
| AAV CHt-6.1 | 808 | WO2016065001 SEQ ID NO: 32 |
| AAV CHt-6.10 | 809 | WO2016065001 SEQ ID NO: 33 |
| AAV CHt-6.5 | 810 | WO2016065001 SEQ ID NO: 34 |
| AAV CHt-6.6 | 811 | WO2016065001 SEQ ID NO: 35 |
| AAV CHt-6.7 | 812 | WO2016065001 SEQ ID NO: 36 |
| AAV CHt-6.8 | 813 | WO2016065001 SEQ ID NO: 37 |
| AAV CSp-8.10 | 814 | WO2016065001 SEQ ID NO: 38 |
| AAV CSp-8.2 | 815 | WO2016065001 SEQ ID NO: 39 |
| AAV CSp-8.4 | 816 | WO2016065001 SEQ ID NO: 40 |
| AAV CSp-8.5 | 817 | WO2016065001 SEQ ID NO: 41 |
| AAV CSp-8.6 | 818 | WO2016065001 SEQ ID NO: 42 |
| AAV CSp-8.7 | 819 | WO2016065001 SEQ ID NO: 43 |
| AAV CSp-8.8 | 820 | WO2016065001 SEQ ID NO: 44 |
| AAV CSp-8.9 | 821 | WO2016065001 SEQ ID NO: 45 |
| AAV CBr-B7.3 | 822 | WO2016065001 SEQ ID NO: 46 |
| AAV CBr-B7.4 | 823 | WO2016065001 SEQ ID NO: 47 |
| AAV3B | 824 | WO2016065001 SEQ ID NO: 48 |
| AAV4 | 825 | WO2016065001 SEQ ID NO: 49 |
| AAV5 | 826 | WO2016065001 SEQ ID NO: 50 |
| AAV CHt-P2 | 827 | WO2016065001 SEQ ID NO: 51 |
| AAV CHt-P5 | 828 | WO2016065001 SEQ ID NO: 52 |
| AAV CHt-P9 | 829 | WO2016065001 SEQ ID NO: 53 |
| AAV CBr-7.1 | 830 | WO2016065001 SEQ ID NO: 54 |
| AAV CBr-7.2 | 831 | WO2016065001 SEQ ID NO: 55 |
| AAV CBr-7.3 | 832 | WO2016065001 SEQ ID NO: 56 |
| AAV CBr-7.4 | 833 | WO2016065001 SEQ ID NO: 57 |
| AAV CBr-7.5 | 834 | WO2016065001 SEQ ID NO: 58 |
| AAV CBr-7.7 | 835 | WO2016065001 SEQ ID NO: 59 |
| AAV CBr-7.8 | 836 | WO2016065001 SEQ ID NO: 60 |
| AAV CBr-7.10 | 837 | WO2016065001 SEQ ID NO: 61 |
| AAV CKd-N3 | 838 | WO2016065001 SEQ ID NO: 62 |
| AAV CKd-N4 | 839 | WO2016065001 SEQ ID NO: 63 |
| AAV CKd-N9 | 840 | WO2016065001 SEQ ID NO: 64 |
| AAV CLv-L4 | 841 | WO2016065001 SEQ ID NO: 65 |
| AAV CLv-L5 | 842 | WO2016065001 SEQ ID NO: 66 |
| AAV CLv-L6 | 843 | WO2016065001 SEQ ID NO: 67 |
| AAV CLv-K1 | 844 | WO2016065001 SEQ ID NO: 68 |
| AAV CLv-K3 | 845 | WO2016065001 SEQ ID NO: 69 |
| AAV CLv-K6 | 846 | WO2016065001 SEQ ID NO: 70 |
| AAV CLv-M1 | 847 | WO2016065001 SEQ ID NO: 71 |
| AAV CLv-M11 | 848 | WO2016065001 SEQ ID NO: 72 |
| AAV CLv-M2 | 849 | WO2016065001 SEQ ID NO: 73 |
| AAV CLv-M5 | 850 | WO2016065001 SEQ ID NO: 74 |
| AAV CLv-M6 | 851 | WO2016065001 SEQ ID NO: 75 |
| AAV CLv-M7 | 852 | WO2016065001 SEQ ID NO: 76 |
| AAV CLv-M8 | 853 | WO2016065001 SEQ ID NO: 77 |
| AAV CLv-M9 | 854 | WO2016065001 SEQ ID NO: 78 |
| AAV CHt-P1 | 855 | WO2016065001 SEQ ID NO: 79 |
| AAV CHt-P6 | 856 | WO2016065001 SEQ ID NO: 80 |
| AAV CHt-P8 | 857 | WO2016065001 SEQ ID NO: 81 |
| AAV CHt-6.1 | 858 | WO2016065001 SEQ ID NO: 82 |
| AAV CHt-6.10 | 859 | WO2016065001 SEQ ID NO: 83 |
| AAV CHt-6.5 | 860 | WO2016065001 SEQ ID NO: 84 |
| AAV CHt-6.6 | 861 | WO2016065001 SEQ ID NO: 85 |
| AAV CHt-6.7 | 862 | WO2016065001 SEQ ID NO: 86 |
| AAV CHt-6.8 | 863 | WO2016065001 SEQ ID NO: 87 |
| AAV CSp-8.10 | 864 | WO2016065001 SEQ ID NO: 88 |
| AAV CSp-8.2 | 865 | WO2016065001 SEQ ID NO: 89 |
| AAV CSp-8.4 | 866 | WO2016065001 SEQ ID NO: 90 |
| AAV CSp-8.5 | 867 | WO2016065001 SEQ ID NO: 91 |
| AAV CSp-8.6 | 868 | WO2016065001 SEQ ID NO: 92 |
| AAV CSp-8.7 | 869 | WO2016065001 SEQ ID NO: 93 |
| AAV CSp-8.8 | 870 | WO2016065001 SEQ ID NO: 94 |
| AAV CSp-8.9 | 871 | WO2016065001 SEQ ID NO: 95 |
| AAV CBr-B7.3 | 872 | WO2016065001 SEQ ID NO: 96 |
| AAV CBr-B7.4 | 873 | WO2016065001 SEQ ID NO: 97 |
| AAV3B | 874 | WO2016065001 SEQ ID NO: 98 |
| AAV4 | 875 | WO2016065001 SEQ ID NO: 99 |
| AAV5 | 876 | WO2016065001 SEQ ID NO: 100 |
| GPV | 877 | U.S. Pat. No. 9,624,274B2 SEQ ID NO: 192 |
| B19 | 878 | U.S. Pat. No. 9,624,274B2 SEQ ID NO: 193 |
| MVM | 879 | U.S. Pat. No. 9,624,274B2 SEQ ID NO: 194 |
| FPV | 880 | U.S. Pat. No. 9,624,274B2 SEQ ID NO: 195 |
| CPV | 881 | U.S. Pat. No. 9,624,274B2 SEQ ID NO: 196 |
| AAV6 | 882 | U.S. Pat. No. 9,546,112B2 SEQ ID NO: 5 |
| AAV6 | 883 | U.S. Pat. No. 9,457,103B2 SEQ ID NO: 1 |
| AAV2 | 884 | U.S. Pat. No. 9,457,103B2 SEQ ID NO: 2 |
| ShH10 | 885 | U.S. Pat. No. 9,457,103B2 SEQ ID NO: 3 |
| ShH13 | 886 | U.S. Pat. No. 9,457,103B2 SEQ ID NO: 4 |
| ShH10 | 887 | U.S. Pat. No. 9,457,103B2 SEQ ID NO: 5 |
| ShH10 | 888 | U.S. Pat. No. 9,457,103B2 SEQ ID NO: 6 |
| ShH10 | 889 | U.S. Pat. No. 9,457,103B2 SEQ ID NO: 7 |
| ShH10 | 890 | U.S. Pat. No. 9,457,103B2 SEQ ID NO: 8 |
| ShH10 | 891 | U.S. Pat. No. 9,457,103B2 SEQ ID NO: 9 |
| rh74 | 892 | U.S. Pat. No. 9,434,928B2 SEQ ID NO: 1, US2015023924A1 SEQ ID NO: 2 |
| rh74 | 893 | U.S. Pat. No. 9,434,928B2 SEQ ID NO: 2, US2015023924A1 SEQ ID NO: 1 |
| AAV8 | 894 | U.S. Pat. No. 9,434,928B2 SEQ ID NO: 4 |
| rh74 | 895 | U.S. Pat. No. 9,434,928B2 SEQ ID NO: 5 |
| rh74 (RHM4-1) | 896 | US2015023924A1 SEQ ID NO: 5, US20160375110A1 SEQ ID NO: 4 |
| rh74 (RHM15-1) | 897 | US2015023924A1 SEQ ID NO: 6, US20160375110A1 SEQ ID NO: 5 |
| rh74 (RHM15-2) | 898 | US2015023924A1 SEQ ID NO: 7, US20160375110A1 SEQ ID NO: 6 |
| rh74 (RHM15-3/RHM15-5) | 899 | US2015023924A1 SEQ ID NO: 8, US20160375110A1 SEQ ID NO: 7 |
| rh74 (RHM15-4) | 900 | US2015023924A1 SEQ ID NO: 9, US20160375110A1 SEQ ID NO: 8 |
| rh74 (RHM15-6) | 901 | US2015023924A1 SEQ ID NO: 10, US20160375110A1 SEQ ID NO: 9 |
| rh74 (RHM4-1) | 902 | US2015023924A1 SEQ ID NO: 11 |
| rh74 (RHM15-1) | 903 | US2015023924A1 SEQ ID NO: 12 |
| rh74 (RHM15-2) | 904 | US2015023924A1 SEQ ID NO: 13 |
| rh74 (RHM15-3/RHM15-5) | 905 | US2015023924A1 SEQ ID NO: 14 |
| rh74 (RHM15-4) | 906 | US2015023924A1 SEQ ID NO: 15 |
| rh74 (RHM15-6) | 907 | US2015023924A1 SEQ ID NO: 16 |
| AAV2 (comprising lung specific polypeptide) | 908 | US20160175389A1 SEQ ID NO: 9 |
| AAV2 (comprising lung specific polypeptide) | 909 | US20160175389A1 SEQ ID NO: 10 |
| Anc80 | 910 | US20170051257A1 SEQ ID NO: 1 |
| Anc80 | 911 | US20170051257A1 SEQ ID NO: 2 |
| Anc81 | 912 | US20170051257A1 SEQ ID NO: 3 |
| Anc80 | 913 | US20170051257A1 SEQ ID NO: 4 |
| Anc82 | 914 | US20170051257A1 SEQ ID NO: 5 |
| Anc82 | 915 | US20170051257A1 SEQ ID NO: 6 |
| Anc83 | 916 | US20170051257A1 SEQ ID NO: 7 |
| Anc83 | 917 | US20170051257A1 SEQ ID NO: 8 |
| Anc84 | 918 | US20170051257A1 SEQ ID NO: 9 |
| Anc84 | 919 | US20170051257A1 SEQ ID NO: 10 |
| Anc94 | 920 | US20170051257A1 SEQ ID NO: 11 |
| Anc94 | 921 | US20170051257A1 SEQ ID NO: 12 |
| Anc113 | 922 | US20170051257A1 SEQ ID NO: 13 |
| Anc113 | 923 | US20170051257A1 SEQ ID NO: 14 |
| Anc126 | 924 | US20170051257A1 SEQ ID NO: 15 |
| Anc126 | 925 | US20170051257A1 SEQ ID NO: 16 |
| Anc127 | 926 | US20170051257A1 SEQ ID NO: 17 |
| Anc127 | 927 | US20170051257A1 SEQ ID NO: 18 |
| Anc80L27 | 928 | US20170051257A1 SEQ ID NO: 19 |
| Anc80L59 | 929 | US20170051257A1 SEQ ID NO: 20 |
| Anc80L60 | 930 | US20170051257A1 SEQ ID NO: 21 |
| Anc80L62 | 931 | US20170051257A1 SEQ ID NO: 22 |
| Anc80L65 | 932 | US20170051257A1 SEQ ID NO: 23 |
| Anc80L33 | 933 | US20170051257A1 SEQ ID NO: 24 |
| Anc80L36 | 934 | US20170051257A1 SEQ ID NO: 25 |
| Anc80L44 | 935 | US20170051257A1 SEQ ID NO: 26 |
| Anc80L1 | 936 | US20170051257A1 SEQ ID NO: 35 |
| Anc80L1 | 937 | US20170051257A1 SEQ ID NO: 36 |
| AAV-X1 | 938 | U.S. Pat. No. 8,283,151B2 SEQ ID NO: 11 |
| AAV-X1b | 939 | U.S. Pat. No. 8,283,151B2 SEQ ID NO: 12 |
| AAV-X5 | 940 | U.S. Pat. No. 8,283,151B2 SEQ ID NO: 13 |
| AAV-X19 | 941 | U.S. Pat. No. 8,283,151B2 SEQ ID NO: 14 |
| AAV-X21 | 942 | U.S. Pat. No. 8,283,151B2 SEQ ID NO: 15 |
| AAV-X22 | 943 | U.S. Pat. No. 8,283,151B2 SEQ ID NO: 16 |
| AAV-X23 | 944 | U.S. Pat. No. 8,283,151B2 SEQ ID NO: 17 |
| AAV-X24 | 945 | U.S. Pat. No. 8,283,151B2 SEQ ID NO: 18 |
| AAV-X25 | 946 | U.S. Pat. No. 8,283,151B2 SEQ ID NO: 19 |
| AAV-X26 | 947 | U.S. Pat. No. 8,283,151B2 SEQ ID NO: 20 |
| AAV-X1 | 948 | U.S. Pat. No. 8,283,151B2 SEQ ID NO: 21 |
| AAV-X1b | 949 | U.S. Pat. No. 8,283,151B2 SEQ ID NO: 22 |
| AAV-X5 | 950 | U.S. Pat. No. 8,283,151B2 SEQ ID NO: 23 |
| AAV-X19 | 951 | U.S. Pat. No. 8,283,151B2 SEQ ID NO: 24 |
| AAV-X21 | 952 | U.S. Pat. No. 8,283,151B2 SEQ ID NO: 25 |
| AAV-X22 | 953 | U.S. Pat. No. 8,283,151B2 SEQ ID NO: 26 |
| AAV-X23 | 954 | U.S. Pat. No. 8,283,151B2 SEQ ID NO: 27 |
| AAV-X24 | 955 | U.S. Pat. No. 8,283,151B2 SEQ ID NO: 28 |
| AAV-X25 | 956 | U.S. Pat. No. 8,283,151B2 SEQ ID NO: 29 |
| AAV-X26 | 957 | U.S. Pat. No. 8,283,151B2 SEQ ID NO: 30 |
| AAVrh8 | 958 | WO2016054554A1 SEQ ID NO: 8 |
| AAVrh8VP2FC5 | 959 | WO2016054554A1 SEQ ID NO: 9 |
| AAVrh8VP2FC44 | 960 | WO2016054554A1 SEQ ID NO: 10 |
| AAVrh8VP2ApoB100 | 961 | WO2016054554A1 SEQ ID NO: 11 |
| AAVrh8VP2RVG | 962 | WO2016054554A1 SEQ ID NO: 12 |
| AA Vrh8VP2Angiopep-2 VP2 | 963 | WO2016054554A1 SEQ ID NO: 13 |
| AAV9.47VP1.3 | 964 | WO2016054554A1 SEQ ID NO: 14 |
| AAV9.47VP2ICAMg3 | 965 | WO2016054554A1 SEQ ID NO: 15 |
| AAV9.47VP2RVG | 966 | WO2016054554A1 SEQ ID NO: 16 |
| AAV9.47VP2Angiopep-2 | 967 | WO2016054554A1 SEQ ID NO: 17 |
| AAV9.47VP2A-string | 968 | WO2016054554A1 SEQ ID NO: 18 |
| AAVrh8VP2FC5 VP2 | 969 | WO2016054554A1 SEQ ID NO: 19 |
| AAVrh8VP2FC44 VP2 | 970 | WO2016054554A1 SEQ ID NO: 20 |
| AAVrh8VP2ApoB100 VP2 | 971 | WO2016054554A1 SEQ ID NO: 21 |
| AAVrh8VP2RVG VP2 | 972 | WO2016054554A1 SEQ ID NO: 22 |
| AAVrh8VP2Angiopep-2 VP2 | 973 | WO2016054554A1 SEQ ID NO: 23 |
| AAV9.47VP2ICAMg3 VP2 | 974 | WO2016054554A1 SEQ ID NO: 24 |
| AAV9.47VP2RVG VP2 | 975 | WO2016054554A1 SEQ ID NO: 25 |
| AAV9.47VP2Angiopep-2 VP2 | 976 | WO2016054554A1 SEQ ID NO: 26 |
| AAV9.47VP2A-string VP2 | 977 | WO2016054554A1 SEQ ID NO: 27 |
| rAAV-B1 | 978 | WO2016054557A1 SEQ ID NO: 1 |
| rAAV-B2 | 979 | WO2016054557A1 SEQ ID NO: 2 |
| rAAV-B3 | 980 | WO2016054557A1 SEQ ID NO: 3 |
| rAAV-B4 | 981 | WO2016054557A1 SEQ ID NO: 4 |
| rAAV-B1 | 982 | WO2016054557A1 SEQ ID NO: 5 |
| rAAV-B2 | 983 | WO2016054557A1 SEQ ID NO: 6 |
| rAAV-B3 | 984 | WO2016054557A1 SEQ ID NO: 7 |
| rAAV-B4 | 985 | WO2016054557A1 SEQ ID NO: 8 |
| rAAV-L1 | 986 | WO2016054557A1 SEQ ID NO: 9 |
| rAAV-L2 | 987 | WO2016054557A1 SEQ ID NO: 10 |
| rAAV-L3 | 988 | WO2016054557A1 SEQ ID NO: 11 |
| rAAV-L4 | 989 | WO2016054557A1 SEQ ID NO: 12 |
| rAAV-L1 | 990 | WO2016054557A1 SEQ ID NO: 13 |
| rAAV-L2 | 991 | WO2016054557A1 SEQ ID NO: 14 |
| rAAV-L3 | 992 | WO2016054557A1 SEQ ID NO: 15 |
| rAAV-L4 | 993 | WO2016054557A1 SEQ ID NO: 16 |
| AAV9 | 994 | WO2016073739A1 SEQ ID NO: 3 |
| rAAV | 995 | WO2016081811A1 SEQ ID NO: 1 |
| rAAV | 996 | WO2016081811A1 SEQ ID NO: 2 |
| rAAV | 997 | WO2016081811A1 SEQ ID NO: 3 |
| rAAV | 998 | WO2016081811A1 SEQ ID NO: 4 |
| rAAV | 999 | WO2016081811A1 SEQ ID NO: 5 |
| rAAV | 1000 | WO2016081811A1 SEQ ID NO: 6 |
| rAAV | 1001 | WO2016081811A1 SEQ ID NO: 7 |
| rAAV | 1002 | WO2016081811A1 SEQ ID NO: 8 |
| rAAV | 1003 | WO2016081811A1 SEQ ID NO: 9 |
| rAAV | 1004 | WO2016081811A1 SEQ ID NO: 10 |
| rAAV | 1005 | WO2016081811A1 SEQ ID NO: 11 |
| rAAV | 1006 | WO2016081811A1 SEQ ID NO: 12 |
| rAAV | 1007 | WO2016081811A1 SEQ ID NO: 13 |
| rAAV | 1008 | WO2016081811A1 SEQ ID NO: 14 |
| rAAV | 1009 | WO2016081811A1 SEQ ID NO: 15 |
| rAAV | 1010 | WO2016081811A1 SEQ ID NO: 16 |
| rAAV | 1011 | WO2016081811A1 SEQ ID NO: 17 |
| rAAV | 1012 | WO2016081811A1 SEQ ID NO: 18 |
| rAAV | 1013 | WO2016081811A1 SEQ ID NO: 19 |
| rAAV | 1014 | WO2016081811A1 SEQ ID NO: 20 |
| rAAV | 1015 | WO2016081811A1 SEQ ID NO: 21 |
| rAAV | 1016 | WO2016081811A1 SEQ ID NO: 22 |
| rAAV | 1017 | WO2016081811A1 SEQ ID NO: 23 |
| rAAV | 1018 | WO2016081811A1 SEQ ID NO: 24 |
| rAAV | 1019 | WO2016081811A1 SEQ ID NO: 25 |
| rAAV | 1020 | WO2016081811A1 SEQ ID NO: 26 |
| rAAV | 1021 | WO2016081811A1 SEQ ID NO: 27 |
| rAAV | 1022 | WO2016081811A1 SEQ ID NO: 28 |
| rAAV | 1023 | WO2016081811A1 SEQ ID NO: 29 |
| rAAV | 1024 | WO2016081811A1 SEQ ID NO: 30 |
| rAAV | 1025 | WO2016081811A1 SEQ ID NO: 31 |
| rAAV | 1026 | WO2016081811A1 SEQ ID NO: 32 |
| rAAV | 1027 | WO2016081811A1 SEQ ID NO: 33 |
| rAAV | 1028 | WO2016081811A1 SEQ ID NO: 34 |
| rAAV | 1029 | WO2016081811A1 SEQ ID NO: 35 |
| rAAV | 1030 | WO2016081811A1 SEQ ID NO: 36 |
| rAAV | 1031 | WO2016081811A1 SEQ ID NO: 37 |
| rAAV | 1032 | WO2016081811A1 SEQ ID NO: 38 |
| rAAV | 1033 | WO2016081811A1 SEQ ID NO: 39 |
| rAAV | 1034 | WO2016081811A1 SEQ ID NO: 40 |
| rAAV | 1035 | WO2016081811A1 SEQ ID NO: 41 |
| rAAV | 1036 | WO2016081811A1 SEQ ID NO: 42 |
| rAAV | 1037 | WO2016081811A1 SEQ ID NO: 43 |
| rAAV | 1038 | WO2016081811A1 SEQ ID NO: 44 |
| rAAV | 1039 | WO2016081811A1 SEQ ID NO: 45 |
| rAAV | 1040 | WO2016081811A1 SEQ ID NO: 46 |
| rAAV | 1041 | WO2016081811A1 SEQ ID NO: 47 |
| rAAV | 1042 | WO2016081811A1 SEQ ID NO: 48 |
| rAAV | 1043 | WO2016081811A1 SEQ ID NO: 49 |
| rAAV | 1044 | WO2016081811A1 SEQ ID NO: 50 |
| rAAV | 1045 | WO2016081811A1 SEQ ID NO: 51 |
| rAAV | 1046 | WO2016081811A1 SEQ ID NO: 52 |
| rAAV | 1047 | WO2016081811A1 SEQ ID NO: 53 |
| rAAV | 1048 | WO2016081811A1 SEQ ID NO: 54 |
| rAAV | 1049 | WO2016081811A1 SEQ ID NO: 55 |
| rAAV | 1050 | WO2016081811A1 SEQ ID NO: 56 |
| rAAV | 1051 | WO2016081811A1 SEQ ID NO: 57 |
| rAAV | 1052 | WO2016081811A1 SEQ ID NO: 58 |
| rAAV | 1053 | WO2016081811A1 SEQ ID NO: 59 |
| rAAV | 1054 | WO2016081811A1 SEQ ID NO: 60 |
| rAAV | 1055 | WO2016081811A1 SEQ ID NO: 61 |
| rAAV | 1056 | WO2016081811A1 SEQ ID NO: 62 |
| rAAV | 1057 | WO2016081811A1 SEQ ID NO: 63 |
| rAAV | 1058 | WO2016081811A1 SEQ ID NO: 64 |
| rAAV | 1059 | WO2016081811A1 SEQ ID NO: 65 |
| rAAV | 1060 | WO2016081811A1 SEQ ID NO: 66 |
| rAAV | 1061 | WO2016081811A1 SEQ ID NO: 67 |
| rAAV | 1062 | WO2016081811A1 SEQ ID NO: 68 |
| rAAV | 1063 | WO2016081811A1 SEQ ID NO: 69 |
| rAAV | 1064 | WO2016081811A1 SEQ ID NO: 70 |
| rAAV | 1065 | WO2016081811A1 SEQ ID NO: 71 |
| rAAV | 1066 | WO2016081811A1 SEQ ID NO: 72 |
| rAAV | 1067 | WO2016081811A1 SEQ ID NO: 73 |
| rAAV | 1068 | WO2016081811A1 SEQ ID NO: 74 |
| rAAV | 1069 | WO2016081811A1 SEQ ID NO: 75 |
| rAAV | 1070 | WO2016081811A1 SEQ ID NO: 76 |
| rAAV | 1071 | WO2016081811A1 SEQ ID NO: 77 |
| rAAV | 1072 | WO2016081811A1 SEQ ID NO: 78 |
| rAAV | 1073 | WO2016081811A1 SEQ ID NO: 79 |
| rAAV | 1074 | WO2016081811A1 SEQ ID NO: 80 |
| rAAV | 1075 | WO2016081811A1 SEQ ID NO: 81 |
| rAAV | 1076 | WO2016081811A1 SEQ ID NO: 82 |
| rAAV | 1077 | WO2016081811A1 SEQ ID NO: 83 |
| rAAV | 1078 | WO2016081811A1 SEQ ID NO: 84 |
| rAAV | 1079 | WO2016081811A1 SEQ ID NO: 85 |
| rAAV | 1080 | WO2016081811A1 SEQ ID NO: 86 |
| rAAV | 1081 | WO2016081811A1 SEQ ID NO: 87 |
| rAAV | 1082 | WO2016081811A1 SEQ ID NO: 88 |
| rAAV | 1083 | WO2016081811A1 SEQ ID NO: 89 |
| rAAV | 1084 | WO2016081811A1 SEQ ID NO: 90 |
| rAAV | 1085 | WO2016081811A1 SEQ ID NO: 91 |
| rAAV | 1086 | WO2016081811A1 SEQ ID NO: 92 |
| rAAV | 1087 | WO2016081811A1 SEQ ID NO: 93 |
| rAAV | 1088 | WO2016081811A1 SEQ ID NO: 94 |
| rAAV | 1089 | WO2016081811A1 SEQ ID NO: 95 |
| rAAV | 1090 | WO2016081811A1 SEQ ID NO: 96 |
| rAAV | 1091 | WO2016081811A1 SEQ ID NO: 97 |
| rAAV | 1092 | WO2016081811A1 SEQ ID NO: 98 |
| rAAV | 1093 | WO2016081811A1 SEQ ID NO: 99 |
| rAAV | 1094 | WO2016081811A1 SEQ ID NO: 100 |
| rAAV | 1095 | WO2016081811A1 SEQ ID NO: 101 |
| rAAV | 1096 | WO2016081811A1 SEQ ID NO: 102 |
| rAAV | 1097 | WO2016081811A1 SEQ ID NO: 103 |
| rAAV | 1098 | WO2016081811A1 SEQ ID NO: 104 |
| rAAV | 1099 | WO2016081811A1 SEQ ID NO: 105 |
| rAAV | 1100 | WO2016081811A1 SEQ ID NO: 106 |
| rAAV | 1101 | WO2016081811A1 SEQ ID NO: 107 |
| rAAV | 1102 | WO2016081811A1 SEQ ID NO: 108 |
| rAAV | 1103 | WO2016081811A1 SEQ ID NO: 109 |
| rAAV | 1104 | WO2016081811A1 SEQ ID NO: 110 |
| rAAV | 1105 | WO2016081811A1 SEQ ID NO: 111 |
| rAAV | 1106 | WO2016081811A1 SEQ ID NO: 112 |
| rAAV | 1107 | WO2016081811A1 SEQ ID NO: 113 |
| rAAV | 1108 | WO2016081811A1 SEQ ID NO: 114 |
| rAAV | 1109 | WO2016081811A1 SEQ ID NO: 115 |
| rAAV | 1110 | WO2016081811A1 SEQ ID NO: 116 |
| rAAV | 1111 | WO2016081811A1 SEQ ID NO: 117 |
| rAAV | 1112 | WO2016081811A1 SEQ ID NO: 118 |
| rAAV | 1113 | WO2016081811A1 SEQ ID NO: 119 |
| rAAV | 1114 | WO2016081811A1 SEQ ID NO: 120 |
| rAAV | 1115 | WO2016081811A1 SEQ ID NO: 121 |
| rAAV | 1116 | WO2016081811A1 SEQ ID NO: 122 |
| rAAV | 1117 | WO2016081811A1 SEQ ID NO: 123 |
| rAAV | 1118 | WO2016081811A1 SEQ ID NO: 124 |
| rAAV | 1119 | WO2016081811A1 SEQ ID NO: 125 |
| rAAV | 1120 | WO2016081811A1 SEQ ID NO: 126 |
| rAAV | 1121 | WO2016081811A1 SEQ ID NO: 127 |
| rAAV | 1122 | WO2016081811A1 SEQ ID NO: 128 |
| AAV8 E532K | 1123 | WO2016081811A1 SEQ ID NO: 133 |
| AAV8 E532K | 1124 | WO2016081811A1 SEQ ID NO: 134 |
| rAAV4 | 1125 | WO2016115382A1 SEQ ID NO: 2 |
| rAAV4 | 1126 | WO2016115382A1 SEQ ID NO: 3 |
| rAAV4 | 1127 | WO2016115382A1 SEQ ID NO: 4 |
| rAAV4 | 1128 | WO2016115382A1 SEQ ID NO: 5 |
| rAAV4 | 1129 | WO2016115382A1 SEQ ID NO: 6 |
| rAAV4 | 1130 | WO2016115382A1 SEQ ID NO: 7 |
| rAAV4 | 1131 | WO2016115382A1 SEQ ID NO: 8 |
| rAAV4 | 1132 | WO2016115382A1 SEQ ID NO: 9 |
| rAAV4 | 1133 | WO2016115382A1 SEQ ID NO: 10 |
| rAAV4 | 1134 | WO2016115382A1 SEQ ID NO: 11 |
| rAAV4 | 1135 | WO2016115382A1 SEQ ID NO: 12 |
| rAAV4 | 1136 | WO2016115382A1 SEQ ID NO: 13 |
| rAAV4 | 1137 | WO2016115382A1 SEQ ID NO: 14 |
| rAAV4 | 1138 | WO2016115382A1 SEQ ID NO: 15 |
| rAAV4 | 1139 | WO2016115382A1 SEQ ID NO: 16 |
| rAAV4 | 1140 | WO2016115382A1 SEQ ID NO: 17 |
| rAAV4 | 1141 | WO2016115382A1 SEQ ID NO: 18 |
| rAAV4 | 1142 | WO2016115382A1 SEQ ID NO: 19 |
| rAAV4 | 1143 | WO2016115382A1 SEQ ID NO: 20 |
| rAAV4 | 1144 | WO2016115382A1 SEQ ID NO: 21 |
| AAV11 | 1145 | WO2016115382A1 SEQ ID NO: 22 |
| AAV12 | 1146 | WO2016115382A1 SEQ ID NO: 23 |
| rh32 | 1147 | WO2016115382A1 SEQ ID NO: 25 |
| rh33 | 1148 | WO2016115382A1 SEQ ID NO: 26 |
| rh34 | 1149 | WO2016115382A1 SEQ ID NO: 27 |
| rAAV4 | 1150 | WO2016115382A1 SEQ ID NO: 28 |
| rAAV4 | 1151 | WO2016115382A1 SEQ ID NO: 29 |
| rAAV4 | 1152 | WO2016115382A1 SEQ ID NO: 30 |
| rAAV4 | 1153 | WO2016115382A1 SEQ ID NO: 31 |
| rAAV4 | 1154 | WO2016115382A1 SEQ ID NO: 32 |
| rAAV4 | 1155 | WO2016115382A1 SEQ ID NO: 33 |
| AAV2/8 | 1156 | WO2016131981A1 SEQ ID NO: 47 |
| AAV2/8 | 1157 | WO2016131981A1 SEQ ID NO: 48 |
| ancestral AAV | 1158 | WO2016154344A1 SEQ ID NO: 7 |
| ancestral AAV variant C4 | 1159 | WO2016154344A1 SEQ ID NO: 13 |
| ancestral AAV variant C7 | 1160 | WO2016154344A1 SEQ ID NO: 14 |
| ancestral AAV variant G4 | 1161 | WO2016154344A1 SEQ ID NO: 15 |
| consensus amino acid sequence of | 1162 | WO2016154344A1 SEQ ID NO: 16 |
| ancestral AAV variants, C4, C7 and G4 | | |
| consensus amino acid sequence of | 1163 | WO2016154344A1 SEQ ID NO: 17 |
| ancestral AAV variants, C4 and C7 | | |
| AAV8 (with an AAV2 phospholipase domain) | 1164 | WO2016150403A1 SEQ ID NO: 13 |
| AAV VR-942n | 1165 | US20160289275A1 SEQ ID NO: 10 |
| AAV5-A (M569V) | 1166 | US20160289275A1 SEQ ID NO: 13 |
| AAV5-A (M569V) | 1167 | US20160289275A1 SEQ ID NO: 14 |
| AAV5-A (Y585V) | 1168 | US20160289275A1 SEQ ID NO: 16 |
| AAV5-A (Y585V) | 1169 | US20160289275A1 SEQ ID NO: 17 |
| AAV5-A (L587T) | 1170 | US20160289275A1 SEQ ID NO: 19 |
| AAV5-A (L587T) | 1171 | US20160289275A1 SEQ ID NO: 20 |
| AAV5-A (Y585V/L587T) | 1172 | US20160289275A1 SEQ ID NO: 22 |
| AAV5-A (Y585V/L587T) | 1173 | US20160289275A1 SEQ ID NO: 23 |
| AAV5-B (D652A) | 1174 | US20160289275A1 SEQ ID NO: 25 |
| AAV5-B (D652A) | 1175 | US20160289275A1 SEQ ID NO: 26 |
| AAV5-B (T362M) | 1176 | US20160289275A1 SEQ ID NO: 28 |
| AAV5-B (T362M) | 1177 | US20160289275A1 SEQ ID NO: 29 |
| AAV5-B (Q359D) | 1178 | US20160289275A1 SEQ ID NO: 31 |
| AAV5-B (Q359D) | 1179 | US20160289275A1 SEQ ID NO: 32 |
| AAV5-B (E350Q) | 1180 | US20160289275A1 SEQ ID NO: 34 |
| AAV5-B (E350Q) | 1181 | US20160289275A1 SEQ ID NO: 35 |
| AAV5-B (P533S) | 1182 | US20160289275A1 SEQ ID NO: 37 |
| AAV5-B (P533S) | 1183 | US20160289275A1 SEQ ID NO: 38 |
| AAV5-B (P533G) | 1184 | US20160289275A1 SEQ ID NO: 40 |
| AAV5-B (P533G) | 1185 | US20160289275A1 SEQ ID NO: 41 |
| AAV5-mutation in loop VII | 1186 | US20160289275A1 SEQ ID NO: 43 |
| AAV5-mutation in loop VII | 1187 | US20160289275A1 SEQ ID NO: 44 |
| AAV8 | 1188 | US20160289275A1 SEQ ID NO: 47 |
| Mut A (LK03/AAV8) | 1189 | WO2016181123A1 SEQ ID NO: 1 |
| Mut B (LK03/AAV5) | 1190 | WO2016181123A1 SEQ ID NO: 2 |
| Mut C (AAV8/AAV3B) | 1191 | WO2016181123A1 SEQ ID NO: 3 |
| Mut D (AAV5/AAV3B) | 1192 | WO2016181123A1 SEQ ID NO: 4 |
| Mut E (AAV8/AAV3B) | 1193 | WO2016181123A1 SEQ ID NO: 5 |
| Mut F (AAV3B/AAV8) | 1194 | WO2016181123A1 SEQ ID NO: 6 |
| AAV44.9 | 1195 | WO2016183297A1 SEQ ID NO: 4 |
| AAV44.9 | 1196 | WO2016183297A1 SEQ ID NO: 5 |
| AAVrh8 | 1197 | WO2016183297A1 SEQ ID NO: 6 |
| AAV44.9 (S470N) | 1198 | WO2016183297A1 SEQ ID NO: 9 |
| rh74 VP1 | 1199 | US20160375110A1 SEQ ID NO: 1 |
| AAV-LK03 (L125I) | 1200 | WO2017015102A1 SEQ ID NO: 5 |
| AAV3B (S663V + T492V) | 1201 | WO2017015102A1 SEQ ID NO: 6 |
| Anc80 | 1202 | WO2017019994A2 SEQ ID NO: 1 |
| Anc80 | 1203 | WO2017019994A2 SEQ ID NO: 2 |
| Anc81 | 1204 | WO2017019994A2 SEQ ID NO: 3 |
| Anc81 | 1205 | WO2017019994A2 SEQ ID NO: 4 |
| Anc82 | 1206 | WO2017019994A2 SEQ ID NO: 5 |
| Anc82 | 1207 | WO2017019994A2 SEQ ID NO: 6 |
| Anc83 | 1208 | WO2017019994A2 SEQ ID NO: 7 |
| Anc83 | 1209 | WO2017019994A2 SEQ ID NO: 8 |
| Anc84 | 1210 | WO2017019994A2 SEQ ID NO: 9 |
| Anc84 | 1211 | WO2017019994A2 SEQ ID NO: 10 |
| Anc94 | 1212 | WO2017019994A2 SEQ ID NO: 11 |
| Anc94 | 1213 | WO2017019994A2 SEQ ID NO: 12 |
| Anc113 | 1214 | WO2017019994A2 SEQ ID NO: 13 |
| Anc113 | 1215 | WO2017019994A2 SEQ ID NO: 14 |
| Anc126 | 1216 | WO2017019994A2 SEQ ID NO: 15 |
| Anc126 | 1217 | WO2017019994A2 SEQ ID NO: 16 |
| Anc127 | 1218 | WO2017019994A2 SEQ ID NO: 17 |
| Anc127 | 1219 | WO2017019994A2 SEQ ID NO: 18 |
| Anc80L27 | 1220 | WO2017019994A2 SEQ ID NO: 19 |
| Anc80L59 | 1221 | WO2017019994A2 SEQ ID NO: 20 |
| Anc80L60 | 1222 | WO2017019994A2 SEQ ID NO: 21 |
| Anc80L62 | 1223 | WO2017019994A2 SEQ ID NO: 22 |
| Anc80L65 | 1224 | WO2017019994A2 SEQ ID NO: 23 |
| Anc80L33 | 1225 | WO2017019994A2 SEQ ID NO: 24 |
| Anc80L36 | 1226 | WO2017019994A2 SEQ ID NO: 25 |
| Anc80L44 | 1227 | WO2017019994A2 SEQ ID NO: 26 |
| Anc80L1 | 1228 | WO2017019994A2 SEQ ID NO: 35 |
| Anc80L1 | 1229 | WO2017019994A2 SEQ ID NO: 36 |
| AAVrh10 | 1230 | WO2017019994A2 SEQ ID NO: 41 |
| Anc110 | 1231 | WO2017019994A2 SEQ ID NO: 42 |
| Anc110 | 1232 | WO2017019994A2 SEQ ID NO: 43 |
| AAVrh32.33 | 1233 | WO2017019994A2 SEQ ID NO: 45 |
| AAVrh74 | 1234 | WO2017049031A1 SEQ ID NO: 1 |
| AAV2 | 1235 | WO2017053629A2 SEQ ID NO: 49 |
| AAV2 | 1236 | WO2017053629A2 SEQ ID NO: 50 |
| AAV2 | 1237 | WO2017053629A2 SEQ ID NO: 82 |
| Parvo-like virus | 1238 | WO2017070476A2 SEQ ID NO: 1 |
| Parvo-like virus | 1239 | WO2017070476A2 SEQ ID NO: 2 |
| Parvo-like virus | 1240 | WO2017070476A2 SEQ ID NO: 3 |
| Parvo-like virus | 1241 | WO2017070476A2 SEQ ID NO: 4 |
| Parvo-like virus | 1242 | WO2017070476A2 SEQ ID NO: 5 |
| Parvo-like virus | 1243 | WO2017070476A2 SEQ ID NO: 6 |
| AAVrh.10 | 1244 | WO2017070516A1 SEQ ID NO: 7 |
| AAVrh.10 | 1245 | WO2017070516A1 SEQ ID NO: 14 |
| AAV2tYF | 1246 | WO2017070491A1 SEQ ID NO: 1 |
| AAV-SPK | 1247 | WO2017075619A1 SEQ ID NO: 28 |
| AAV2.5 | 1248 | US20170128528A1 SEQ ID NO: 13 |
| AAV1.1 | 1249 | US20170128528A1 SEQ ID NO: 15 |
| AAV6.1 | 1250 | US20170128528A1 SEQ ID NO: 17 |
| AAV6.3.1 | 1251 | US20170128528A1 SEQ ID NO: 18 |
| AAV2i8 | 1252 | US20170128528A1 SEQ ID NO: 28 |
| AAV2i8 | 1253 | US20170128528A1 SEQ ID NO: 29 |
| ttAAV | 1254 | US20170128528A1 SEQ ID NO: 30 |
| ttAAV-S312N | 1255 | US20170128528A1 SEQ ID NO: 32 |
| ttAAV-S312N | 1256 | US20170128528A1 SEQ ID NO: 33 |
| AAV6 (Y705, Y731, and T492) | 1257 | WO2016134337A1 SEQ ID NO: 24 |
| AAV2 | 1258 | WO2016134375A1 SEQ ID NO: 9 |
| AAV2 | 1259 | WO2016134375A1 SEQ ID NO: 10 |

[0073] In one embodiment, the AAV serotype may be, or may have a sequence as described in International Patent Publication WO2015038958, the contents of which are herein incorporated by reference in their entirety, such as, but not limited to, AAV9 (SEQ ID NO: 2 and 11 of WO2015038958 or SEQ ID NO: 135 and 136 respectively herein), PHP.B (SEQ ID NO: 8 and 9 of WO2015038958, herein SEQ ID NO: 3 and 4), G2B-13 (SEQ ID NO: 12 of WO2015038958, herein SEQ ID NO: 5), G2B-26 (SEQ ID NO: 13 of WO2015038958, herein SEQ ID NO: 3), TH1.1-32 (SEQ ID NO: 14 of WO2015038958, herein SEQ ID NO: 6), TH1.1-35 (SEQ ID NO: 15 of WO2015038958, herein SEQ ID NO: 7) or variants thereof. Further, any of the targeting peptides or amino acid inserts described in WO2015038958, may be inserted into any parent AAV serotype, such as, but not limited to, AAV9 (SEQ ID NO: 135 for the DNA sequence and SEQ ID NO: 136 for the amino acid sequence). In one embodiment, the amino acid insert is inserted between amino acids 586-592 of the parent AAV (e.g., AAV9). In another embodiment, the amino acid insert is inserted between amino acids 588-589 of the parent AAV sequence. The amino acid insert may be, but is not limited to, any of the following amino acid sequences, TLAVPFK (SEQ ID NO: 1 of WO2015038958; herein SEQ ID NO: 1260), KFPVALT (SEQ ID NO: 3 of WO2015038958; herein SEQ ID NO: 1261), LAVPFK (SEQ ID NO: 31 of WO2015038958; herein SEQ ID NO: 1262). AVPFK (SEQ ID NO: 32 of WO2015038958; herein SEQ ID NO: 1263), VPFK (SEQ ID NO: 33 of WO2015038958; herein SEQ ID NO: 1264), TLAVPF (SEQ ID NO: 34 of WO2015038958; herein SEQ ID NO: 1265), TLAVP (SEQ ID NO: 35 of WO2015038958; herein SEQ ID NO: 1266), TLAV (SEQ ID NO: 36 of WO2015038958; herein SEQ ID NO: 1267), SVSKPFL (SEQ ID NO: 28 of WO2015038958; herein SEQ ID NO: 1268), FTLTTPK (SEQ ID NO: 29 of WO2015038958; herein SEQ ID NO: 1269), MNATKNV (SEQ ID NO: 30 of WO2015038958; herein SEQ ID NO: 1270), QSSQTPR (SEQ ID NO: 54 of WO2015038958; herein SEQ ID NO: 1271), ILGTGTS (SEQ ID NO: 55 of WO2015038958; herein SEQ ID NO: 1272), TRTNPEA (SEQ ID NO: 56 of WO2015038958; herein SEQ ID NO: 1273), NGGTSSS (SEQ ID NO: 58 of WO2015038958; herein SEQ ID NO: 1274), or YTLSQGW (SEQ ID NO: 60 of WO2015038958; herein SEQ ID NO: 1275). Non-limiting examples of nucleotide sequences that may encode the amino acid inserts include the following, AAGTITCCTGTGGCGTTGACT (for SEQ ID NO: 3 of WO2015038958; herein SEQ ID NO: 1276), ACTITGGCGGTGCCTITTAAG (SEQ ID NO: 24 and 49 of WO2015038958; herein SEQ ID NO: 1277), AGTGTGAGTAAGCCTITITTG (SEQ ID NO: 25 of WO2015038958; herein SEQ ID NO: 1278), TITACGTTGACGACGCCTAAG (SEQ ID NO: 26 of WO2015038958; herein SEQ ID NO: 1279), ATGAATGCTACGAAGAATGTG (SEQ ID NO: 27 of WO2015038958; herein SEQ ID NO: 1280), CAGTCGTCGCAGACGCCTAGG (SEQ ID NO: 48 of WO2015038958; herein SEQ ID NO: 1281), ATTCTGGGGACTGGTACTTCG (SEQ ID NO: 50 and 52 of WO2015038958; herein SEQ ID NO: 1282). ACGCGGACTAATCCTGAGGCT (SEQ ID NO: 51 of WO2015038958; herein SEQ ID NO: 1283), AATGGGGGGACTAGTAGTTCT (SEQ ID NO: 53 of WO2015038958; herein SEQ ID NO: 1284), or TATACTITGTCGCAGGGTTGG (SEQ ID NO: 59 of WO2015038958; herein SEQ ID NO: 1285).

[0074] In one embodiment, the AAV serotype may be, or may have a sequence as described in International Patent Publication WO2017100671, the contents of which are herein incorporated by reference in their entirety, such as, but not limited to, AAV9 (SEQ ID NO: 45 of WO2017100671, herein SEQ ID NO: 9), PHP.N (SEQ ID NO: 46 of WO2017100671, herein SEQ ID NO: 2), PHP.S (SEQ ID NO: 47 of WO2017100671, herein SEQ ID NO: 8), or variants thereof. Further, any of the targeting peptides or amino acid inserts described in WO2017100671 may be inserted into any parent AAV serotype, such as, but not limited to, AAV9 (SEQ ID NO: 9 or SEQ ID NO: 131). In one embodiment, the amino acid insert is inserted between amino acids 586-592 of the parent AAV (e.g., AAV9). In another embodiment, the amino acid insert is inserted between amino acids 588-589 of the parent AAV sequence. The amino acid insert may be, but is not limited to, any of the following amino acid sequences, AQTLAVPFKAQ (SEQ ID NO: 1 of WO2017100671; herein SEQ ID NO: 1286), AQSVSKPFLAQ (SEQ ID NO: 2 of WO2017100671; herein SEQ ID NO: 1287), AQFTLTTPKAQ (SEQ ID NO: 3 in the sequence listing of WO2017100671; herein SEQ ID NO: 1288), DGTLAVPFKAQ (SEQ ID NO: 4 in the sequence listing of WO2017100671; herein SEQ ID NO: 1289), ESTLAVPFKAQ (SEQ ID NO: 5 of WO2017100671; herein SEQ ID NO: 1290), GGTLAVPFKAQ (SEQ ID NO: 6 of WO2017100671; herein SEQ ID NO: 1291). AQTLATPFKAQ (SEQ ID NO: 7 and 33 of WO2017100671, herein SEQ ID NO: 1292), ATTLATPFKAQ (SEQ ID NO: 8 of WO2017100671; herein SEQ ID NO: 1293), DGTLATPFKAQ (SEQ ID NO: 9 of WO2017100671; herein SEQ ID NO: 1294), GGTLATPFKAQ (SEQ ID NO: 10 of WO2017100671; herein SEQ ID NO: 1295), SGSLAVPFKAQ (SEQ ID NO: 1 of WO2017100671; herein SEQ ID NO: 1296). AQTLAQPFKAQ (SEQ ID NO: 12 of WO2017100671; herein SEQ ID NO: 1297), AQTLQQPFKAQ (SEQ ID NO: 13 of WO2017100671; herein SEQ ID NO: 1298), AQTLSNPFKAQ (SEQ ID NO: 14 of WO2017100671; herein SEQ ID NO: 1299), AQTLAVPFSNP (SEQ ID NO: 15 of WO2017100671; herein SEQ ID NO: 1300), QGTLAVPFKAQ (SEQ ID NO: 16 of WO2017100671; herein SEQ ID NO: 1301), NQTLAVPFKAQ (SEQ ID NO: 17 of WO2017100671; herein SEQ ID NO: 1302), EGSLAVPFKAQ (SEQ ID NO: 18 of WO2017100671; herein SEQ ID NO: 1303). SGNLAVPFKAQ (SEQ ID NO: 19 of WO2017100671; herein SEQ ID NO: 1304), EGTLAVPFKAQ (SEQ ID NO: 20 of WO2017100671; herein SEQ ID NO: 1305), DSTLAVPFKAQ (SEQ ID NO: 21 in Table 1 of WO2017100671; herein SEQ ID NO: 1306), AVTLAVPFKAQ (SEQ ID NO: 22 of WO2017100671; herein SEQ ID NO: 1307), AQTLSTPFKAQ (SEQ ID NO: 23 of WO2017100671; herein SEQ ID NO: 1308), AQTLPQPFKAQ (SEQ ID NO: 24 and 32 of WO2017100671; herein SEQ ID NO: 1309), AQTLSQPFKAQ (SEQ ID NO: 25 of WO2017100671; herein SEQ ID NO: 1310). AQTLQLPFKAQ (SEQ ID NO: 26 of WO2017100671; herein SEQ ID NO: 1311), AQTLTMPFKAQ (SEQ ID NO: 27, and 34 of WO2017100671 and SEQ ID NO: 35 in the sequence listing of WO2017100671; herein SEQ ID NO: 1312), AQTLTTPFKAQ (SEQ ID NO: 28 of WO2017100671; herein SEQ ID NO: 1313), AQYTLSQGWAQ (SEQ ID NO: 29 of WO2017100671 herein SEQ ID NO: 1314), AQMNATKNVAQ (SEQ ID NO: 30 of WO2017100671; herein SEQ ID NO: 1315), AQVSGGHHSAQ (SEQ ID NO: 31 of WO2017100671; herein SEQ ID NO: 1316), AQTLTAPFKAQ (SEQ ID NO: 35 in Table 1 of WO2017100671; herein SEQ ID NO: 1317), AQTLSKPFKAQ (SEQ ID NO: 36 of WO2017100671; herein SEQ ID NO: 1318), QAVRTSL (SEQ ID NO: 37 of WO2017100671; herein SEQ ID NO: 1319), YTLSQGW (SEQ ID NO: 38 of WO2017100671; herein SEQ ID NO: 1275), LAKERLS (SEQ ID NO: 39 of WO2017100671; herein SEQ ID NO: 1320). TLAVPFK (SEQ ID NO: 40 in the sequence listing of WO2017100671; herein SEQ ID NO: 1260), SVSKPFL (SEQ ID NO: 41 of WO2017100671; herein SEQ ID NO: 1268), FTLTTPK (SEQ ID NO: 42 of WO2017100671; herein SEQ ID NO: 1269), MNSTKNV (SEQ ID NO: 43 of WO2017100671; herein SEQ ID NO: 1321), VSGGHHS (SEQ ID NO: 44 of WO2017100671, herein SEQ ID NO: 1322), SAQTLAVPFKAQAQ (SEQ ID NO: 48 of WO2017100671; herein SEQ ID NO: 1323), SXXXLAVPFKAQAQ (SEQ ID NO: 49 of WO2017100671 wherein X may be any amino acid; herein SEQ ID NO: 1324), SAQXXXVPFKAQAQ (SEQ ID NO: 50 of WO2017100671 wherein X may be any amino acid; herein SEQ ID NO: 1325), SAQTLXXXFKAQAQ (SEQ ID NO: 51 of WO2017100671 wherein X may be any amino acid; herein SEQ ID NO: 1326), SAQTLAVXXXAQAQ (SEQ ID NO: 52 of WO2017100671 wherein X may be any amino acid; herein SEQ ID NO: 1327), SAQTLAVPFXXXAQ (SEQ ID NO: 53 of WO2017100671 wherein X may be any amino acid; herein SEQ ID NO: 1328), TNHQSAQ (SEQ ID NO: 65 of WO2017100671; herein SEQ ID NO: 1329), AQAQTGW (SEQ ID NO: 66 of WO2017100671; herein SEQ ID NO: 1330), DGTLATPFK (SEQ ID NO: 67 of WO2017100671; herein SEQ ID NO: 1331), DGTLATPFKXX (SEQ ID NO: 68 of WO2017100671 wherein X may be any amino acid; herein SEQ ID NO: 1332), LAVPFKAQ (SEQ ID NO: 80 of WO2017100671; herein SEQ ID NO: 1333), VPFKAQ (SEQ ID NO: 81 of WO2017100671; herein SEQ ID NO: 1334), FKAQ (SEQ ID NO: 82 of WO2017100671; herein SEQ ID NO: 1335), AQTLAV (SEQ ID NO: 83 of WO2017100671; herein SEQ ID NO: 1336), AQTLAVPF (SEQ ID NO: 84 of WO2017100671; herein SEQ ID NO: 1337), QAVR (SEQ ID NO: 85 of WO2017100671; herein SEQ ID NO: 1338), AVRT (SEQ ID NO: 86 of WO2017100671; herein SEQ ID NO: 1339), VRTS (SEQ ID NO: 87 of WO2017100671; herein SEQ ID NO: 1340), RTSL (SEQ ID NO: 88 of WO2017100671; herein SEQ ID NO: 1341), QAVRT (SEQ ID NO: 89 of WO2017100671; herein SEQ ID NO: 1342), AVRTS (SEQ ID NO: 90 of WO2017100671; herein SEQ ID NO: 1343), VRTSL (SEQ ID NO: 91 of WO2017100671; herein SEQ ID NO: 1344), QAVRTS (SEQ ID NO: 92 of WO2017100671; herein SEQ ID NO: 1345), or AVRTSL (SEQ ID NO: 93 of WO2017100671; herein SEQ ID NO: 1346).

[0075] Non-limiting examples of nucleotide sequences that may encode the amino acid inserts include the following, GATGGGACTITGGCGGTGCCTITTAAGGCACAG (SEQ ID NO: 54 of WO2017100671; herein SEQ ID NO: 1347), GATGGGACGTTGGCGGTGCCTITTAAGGCACAG (SEQ ID NO: 55 of WO2017100671; herein SEQ ID NO: 1348), CAGGCGGTTAGGACGTCTITG (SEQ ID NO: 56 of WO2017100671; herein SEQ ID NO: 1349), CAGGTCTTCACGGACTCAGACTATCAG (SEQ ID NO: 57 and 78 of WO2017100671; herein SEQ ID NO: 1350), CAAGTAAAACCTCTACAAATGTGGTAAAATCG (SEQ ID NO: 58 of WO2017100671; herein SEQ ID NO: 1351), ACTCATCGACCAATACTTGTACTATCTCTCTAGAAC (SEQ ID NO: 59 of WO2017100671; herein SEQ ID NO: 1352), GGAAGTATTCCTTGGTITTGAACCCA (SEQ ID NO: 60 of WO2017100671; herein SEQ ID NO: 1353), GGTCGCGGTTCTTGTTTGTGGAT (SEQ ID NO: 61 of WO2017100671; herein SEQ ID NO: 1354), CGACCTTGAAGCGCATGAACTCCT (SEQ ID NO: 62 of WO2017100671; herein SEQ ID NO: 1355), GTATTCCTTGGTTGGAACCCAACCGGTCTGCGCCTGTGCMNNMNNMNNMNNM NNMNNMNNTTGGGCACTCTGGTGGTTTGTC (SEQ ID NO: 63 of WO2017100671 wherein N may be A, C, T, or G; herein SEQ ID NO: 1356), GTATTCCTTGGTTTTGAA CCCAACCGGTCTGCGCMNNMNNMNNAAAAGGCA CCG CCAAAGTTTG (SEQ ID NO: 69 of WO2017100671 wherein N may be A, C, T, or G; herein SEQ ID NO: 1357), GTATTCCTTGGTITTGAACCCAACCGGTCTGCGCCTGTGCMNNMNNMNNCACCG CCAAAGTTTGGGCACT (SEQ ID NO: 70 of WO2017100671 wherein N may be A, C, T, or G; herein SEQ ID NO: 1358), GTATTCCTTGGTTTTGAACCCAACCGGTCTGCGCCTGTGCCTTAAAMNNMNNMN NCAAAGTTTGGGCACTCTGGTGG (SEQ ID NO: 71 of WO2017100671 wherein N may be A, C, T, or G; herein SEQ ID NO: 1359), GTATTCCTGGTTITGAACCCAACCGGTCTGCGCCTGTGCCTTAAAAGGCACMNN MNNMNNTTGGGCACTCTGGTGGTTTGTG (SEQ ID NO: 72 of WO2017100671 wherein N may be A, C, T, or G; herein SEQ ID NO: 1360), ACTTTGGCGGTGCCTITTAAG (SEQ ID NO: 74 of WO2017100671; herein SEQ ID NO: 1277), AGTGTGAGTAAGCCI-ITG (SEQ ID NO: 75 of WO2017100671; herein SEQ ID NO: 1278), TTTACGTTGACGACGCCTAAG (SEQ ID NO: 76 of WO2017100671; herein SEQ ID NO: 1279), TATACTTTGTCGCAGGGTTGG (SEQ ID NO: 77 of WO2017100671; herein SEQ ID NO: 1285), or CTTGCGAAGGAGCGGCTTTCG (SEQ ID NO: 79 of WO2017100671; herein SEQ ID NO: 1361).

[0076] In one embodiment, the AAV serotype may be, or may have a sequence as described in U.S. Pat. No. 9,624,274, the contents of which are herein incorporated by reference in their entirety, such as, but not limited to, AAV1 (SEQ ID NO: 181 of U.S. Pat. No. 9,624,274), AAV6 (SEQ ID NO: 182 of U.S. Pat. No. 9,624,274), AAV2 (SEQ ID NO: 183 of U.S. Pat. No. 9,624,274), AAV3b (SEQ ID NO: 184 of U.S. Pat. No. 9,624,274), AAV7 (SEQ ID NO: 185 of U.S. Pat. No. 9,624,274), AAV8 (SEQ ID NO: 186 of U.S. Pat. No. 9,624,274). AAV10 (SEQ ID NO: 187 of U.S. Pat. No. 9,624,274), AAV4 (SEQ ID NO: 188 of U.S. Pat. No. 9,624,274). AAV11 (SEQ ID NO: 189 of U.S. Pat. No. 9,624,274), bAAV (SEQ ID NO: 190 of U.S. Pat. No. 9,624,274), AAV5 (SEQ ID NO: 191 of U.S. Pat. No. 9,624,274), GPV (SEQ ID NO: 192 of U.S. Pat. No. 9,624,274; herein SEQ ID NO: 992), B19 (SEQ ID NO: 193 of US %24274; herein SEQ ID NO: 993), MVM (SEQ ID NO: 194 of U.S. Pat. No. 9,624,274; herein SEQ ID NO: 994), FPV (SEQ ID NO: 195 of US %24274; herein SEQ ID NO: 995), CPV (SEQ ID NO: 196 of U.S. Pat. No. 9,624,274; herein SEQ ID NO: 996) or variants thereof. Further, any of the structural protein inserts described in U.S. Pat. No. 9,624,274, may be inserted into, but not limited to, 1-453 and 1-587 of any parent AAV serotype, such as, but not limited to, AAV2 (SEQ ID NO: 183 of U.S. Pat. No. 9,624,274). The amino acid insert may be, but is not limited to, any of the following amino acid sequences, VNLTWSRASG (SEQ ID NO: 50 of U.S. Pat. No. 9,624,274; herein SEQ ID NO: 1362), EFCINHRGYWVCGD (SEQ ID NO:55 of U.S. Pat. No. 9,624,274; herein SEQ ID NO: 1363), EDGQVMDVDLS (SEQ ID NO: 85 of U.S. Pat. No. 9,624,274; herein SEQ ID NO: 1364), EKQRNGTLT (SEQ ID NO: 86 of U.S. Pat. No. 9,624,274; herein SEQ ID NO: 1365), TYQCRVTHPHLPRALMR (SEQ ID NO: 87 of U.S. Pat. No. 9,624,274; herein SEQ ID NO: 1366), RHSTTQPRKTKGSG (SEQ ID NO: 88 of U.S. Pat. No. 9,624,274; herein SEQ ID NO: 1367), DSNPRGVSAYLSR (SEQ ID NO: 89 of U.S. Pat. No. 9,624,274; herein SEQ ID NO: 1368). TITCLWDLAPSK (SEQ ID NO: 90 of U.S. Pat. No. 9,624,274; herein SEQ ID NO: 1369), KTKGSGFFVF (SEQ ID NO: 91 of U.S. Pat. No. 9,624,274; herein SEQ ID NO: 1370), THPHLPRALMRS (SEQ ID NO: 92 of U.S. Pat. No. 9,624,274; herein SEQ ID NO: 1371). GETYQCRVTHPHLPRALMRSTTK (SEQ ID NO: 93 of U.S. Pat. No. 9,624,274; herein SEQ ID NO: 1372), LPRALMRS (SEQ ID NO: 94 of U.S. Pat. No. 9,624,274; herein SEQ ID NO: 1373), INHRGYWV (SEQ ID NO: 95 of U.S. Pat. No. 9,624,274; herein SEQ ID NO: 1374), CDAGSVRTNAPD (SEQ ID NO: 60 of U.S. Pat. No. 9,624,274; herein SEQ ID NO: 1375), AKAVSNLTESRSESLQS (SEQ ID NO: 96 of U.S. Pat. No. 9,624,274; herein SEQ ID NO: 1376), SLTGDEFKKVLET (SEQ ID NO: 97 of U.S. Pat. No. 9,624,274; herein SEQ ID NO: 1377), REAVAYRFEED (SEQ ID NO: 98 of U.S. Pat. No. 9,624,274; herein SEQ ID NO: 1378), INPEIITLDG (SEQ ID NO: 99 of U.S. Pat. No. 9,624,274; herein SEQ ID NO: 1379), DISVTGAPVITATYL (SEQ ID NO: 100 of U.S. Pat. No. 9,624,274; herein SEQ ID NO: 1380), DISVTGAPVITA (SEQ ID NO: 101 of U.S. Pat. No. 9,624,274; herein SEQ ID NO: 1381), PKTVSNLTESSSESVQS (SEQ ID NO: 102 of U.S. Pat. No. 9,624,274; herein SEQ ID NO: 1382), SLMGDEFKAVLET (SEQ ID NO: 103 of U.S. Pat. No. 9,624,274; herein SEQ ID NO: 1383), QHSVAYTFEED (SEQ ID NO: 104 of U.S. Pat. No. 9,624,274; herein SEQ ID NO: 1384), INPEIITRDG (SEQ ID NO: 105 of U.S. Pat. No. 9,624,274; herein SEQ ID NO: 1385), DISLTGDPVITASYL (SEQ ID NO: 106 of U.S. Pat. No. 9,624,274; herein SEQ ID NO: 1386), DISLTGDPVITA (SEQ ID NO: 107 of U.S. Pat. No. 9,624,274; herein SEQ ID NO: 1387), DQSIDFEIDSA (SEQ ID NO: 108 of U.S. Pat. No. 9,624,274; herein SEQ ID NO: 1388), KNVSEDLPLPTFSPTLLGDS (SEQ ID NO: 109 of U.S. Pat. No. 9,624,274; herein SEQ ID NO: 1389), KNVSEDLPLPT (SEQ ID NO: 110 of U.S. Pat. No. 9,624,274; herein SEQ ID NO: 1390), CDSGRVRTDAPD (SEQ ID NO: 111 of U.S. Pat. No. 9,624,274; herein SEQ ID NO: 1391), FPEHLLVDFLQSLS (SEQ ID NO: 112 of U.S. Pat. No. 9,624,274; herein SEQ ID NO: 1392), DAEFRHDSG (SEQ ID NO: 65 of U.S. Pat. No. 9,624,274; herein SEQ ID NO: 1393), HYAAAQWDFGNTMCQL (SEQ ID NO: 113 of U.S. Pat. No. 9,624,274; herein SEQ ID NO: 1394), YAAQWDFGNTMCQ (SEQ ID NO: 114 of U.S. Pat. No. 9,624,274; herein SEQ ID NO: 1395), RSQKEGLHYT (SEQ ID NO: 115 of U.S. Pat. No. 9,624,274; herein SEQ ID NO: 1396), SSRTPSDKPVAHWANPQAE (SEQ ID NO: 116 of U.S. Pat. No. 9,624,274; herein SEQ ID NO: 1397), SRTPSDKPVAHWANP (SEQ ID NO: 117 of U.S. Pat. No. 9,624,274; herein SEQ ID NO: 1398), SSRTPSDKP (SEQ ID NO: 118 of U.S. Pat. No. 9,624,274; herein SEQ ID NO: 1399), NADGNVDYHMNSVP (SEQ ID NO: 119 of U.S. Pat. No. 9,624,274; herein SEQ ID NO: 1400), DGNVDYHMNSV (SEQ ID NO: 120 of U.S. Pat. No. 9,624,274; herein SEQ ID NO: 1401), RSFKEFLQSSLRALRQ (SEQ ID NO: 121 of U.S. Pat. No. 9,624,274; herein SEQ ID NO: 1402); FKEFLQSSLRA (SEQ ID NO: 122 of U.S. Pat. No. 9,624,274; herein SEQ ID NO: 1403), or QMWAPQWGPD (SEQ ID NO: 123 of U.S. Pat. No. 9,624,274; herein SEQ ID NO: 1404).

[0077] In one embodiment, the AAV serotype may be, or may have a sequence as described in U.S. Pat. No. 9,475,845, the contents of which are herein incorporated by reference in their entirety, such as, but not limited to, AAV capsid proteins comprising modification of one or more amino acids at amino acid positions 585 to 590 of the native AAV2 capsid protein. Further the modification may result in, but not limited to, the amino acid sequence RGNRQA (SEQ ID NO: 3 of U.S. Pat. No. 9,475,845; herein SEQ ID NO: 1405). SSSTDP (SEQ ID NO: 4 of U.S. Pat. No. 9,475,845; herein SEQ ID NO: 1406), SSNTAP (SEQ ID NO: 5 of U.S. Pat. No. 9,475,845; herein SEQ ID NO: 1407), SNSNLP (SEQ ID NO: 6 of U.S. Pat. No. 9,475,845; herein SEQ ID NO: 1408), SSTTAP (SEQ ID NO: 7 of U.S. Pat. No. 9,475,845; herein SEQ ID NO: 1409), AANTAA (SEQ ID NO: 8 of U.S. Pat. No. 9,475,845; herein SEQ ID NO: 1410), QQNTAP (SEQ ID NO: 9 of U.S. Pat. No. 9,475,845; herein SEQ ID NO: 1411), SAQAQA (SEQ ID NO: 10 of U.S. Pat. No. 9,475,845; herein SEQ ID NO: 1412), QANTGP (SEQ ID NO: 11 of U.S. Pat. No. 9,475,845; herein SEQ ID NO: 1413), NATTAP (SEQ ID NO: 12 of U.S. Pat. No. 9,475,845; herein SEQ ID NO: 1414), SSTAGP (SEQ ID NO: 13 and 20 of U.S. Pat. No. 9,475,845; herein SEQ ID NO: 1415), QQNTAA (SEQ ID NO: 14 of U.S. Pat. No. 9,475,845; herein SEQ ID NO: 1416), PSTAGP (SEQ ID NO: 15 of U.S. Pat. No. 9,475,845; herein SEQ ID NO: 1417), NQNTAP (SEQ ID NO: 16 of U.S. Pat. No. 9,475,845; herein SEQ ID NO: 1418), QAANAP (SEQ ID NO: 17 of U.S. Pat. No. 9,475,845; herein SEQ ID NO: 1419), SIVGLP (SEQ ID NO: 18 of U.S. Pat. No. 9,475,845; herein SEQ ID NO: 1420), AASTAA (SEQ ID NO: 19, and 27 of U.S. Pat. No. 9,475,845; herein SEQ ID NO: 1421), SQNTTA (SEQ ID NO: 21 of U.S. Pat. No. 9,475,845; herein SEQ ID NO: 1422), QQDTAP (SEQ ID NO: 22 of U.S. Pat. No. 9,475,845; herein SEQ ID NO: 1423), QTNTGP (SEQ ID NO: 23 of U.S. Pat. No. 9,475,845; herein SEQ ID NO: 1424), QTNGAP (SEQ ID NO: 24 of U.S. Pat. No. 9,475,845; herein SEQ ID NO: 1425), QQNAAP (SEQ ID NO: 25 of U.S. Pat. No. 9,475,845; herein SEQ ID NO: 1426), or AANTQA (SEQ ID NO: 26 of U.S. Pat. No. 9,475,845; herein SEQ ID NO: 1427). In one embodiment, the amino acid modification is a substitution at amino acid positions 262 through 265 in the native AAV2 capsid protein or the corresponding position in the capsid protein of another AAV with a targeting sequence. The targeting sequence may be, but is not limited to, any of the amino acid sequences, NGRAHA (SEQ ID NO: 38 of U.S. Pat. No. 9,475,845; herein SEQ ID NO: 1428), QPEHSST (SEQ ID NO: 39 and 50 of U.S. Pat. No. 9,475,845; herein SEQ ID NO: 1429), VNTANST (SEQ ID NO: 40 of U.S. Pat. No. 9,475,845; herein SEQ ID NO: 1430), HGPMQKS (SEQ ID NO: 41 of U.S. Pat. No. 9,475,845; herein SEQ ID NO: 1431), PHKPPLA (SEQ ID NO: 42 of U.S. Pat. No. 9,475,845; herein SEQ ID NO: 1432), IKNNEMW (SEQ ID NO: 43 of U.S. Pat. No. 9,475,845; herein SEQ ID NO: 1433), RNLDTPM (SEQ ID NO: 44 of U.S. Pat. No. 9,475,845; herein SEQ ID NO: 1434), VDSHRQS (SEQ ID NO: 45 of U.S. Pat. No. 9,475,845; herein SEQ ID NO: 1435), YDSKTKT (SEQ ID NO: 46 of U.S. Pat. No. 9,475,845; herein SEQ ID NO: 1436), SQLPHQK (SEQ ID NO: 47 of U.S. Pat. No. 9,475,845; herein SEQ ID NO: 1437), STMQQNT (SEQ ID NO: 48 of U.S. Pat. No. 9,475,845; herein SEQ ID NO: 1438), TERYMTQ (SEQ ID NO: 49 of U.S. Pat. No. 9,475,845; herein SEQ ID NO: 1439), DASLSTS (SEQ ID NO: 51 of U.S. Pat. No. 9,475,845; herein SEQ ID NO: 1440), DLPNKKT (SEQ ID NO: 52 of U.S. Pat. No. 9,475,845; herein SEQ ID NO: 1441), DLTAARL (SEQ ID NO: 53 of U.S. Pat. No. 9,475,845; herein SEQ ID NO: 1442), EPHQFNY (SEQ ID NO: 54 of U.S. Pat. No. 9,475,845; herein SEQ ID NO: 1443), EPQSNHT (SEQ ID NO: 55 of U.S. Pat. No. 9,475,845; herein SEQ ID NO: 1444), MSSWPSQ (SEQ ID NO: 56 of U.S. Pat. No. 9,475,845; herein SEQ ID NO: 1445), NPKHNAT (SEQ ID NO: 57 of U.S. Pat. No. 9,475,845; herein SEQ ID NO: 1446), PDGMRTT (SEQ ID NO: 58 of U.S. Pat. No. 9,475,845; herein SEQ ID NO: 1447), PNNNKTT (SEQ ID NO: 59 of U.S. Pat. No. 9,475,845; herein SEQ ID NO: 1448), QSTTHDS (SEQ ID NO: 60 of U.S. Pat. No. 9,475,845; herein SEQ ID NO: 1449), TGSKQKQ (SEQ ID NO: 61 of U.S. Pat. No. 9,475,845; herein SEQ ID NO: 1450), SLKHQAL (SEQ ID NO: 62 of U.S. Pat. No. 9,475,845; herein SEQ ID NO: 1451), SPIDGEQ (SEQ ID NO: 63 of U.S. Pat. No. 9,475,845; herein SEQ ID NO: 1452), WIFPWIQL (SEQ ID NO: 64 and 112 of U.S. Pat. No. 9,475,845; herein SEQ ID NO: 1453), CDCRGDCFC (SEQ ID NO: 65 of U.S. Pat. No. 9,475,845; herein SEQ ID NO: 1454), CNGRC (SEQ ID NO: 66 of U.S. Pat. No. 9,475,845; herein SEQ ID NO: 1455), CPRECES (SEQ ID NO: 67 of U.S. Pat. No. 9,475,845; herein SEQ ID NO: 1456), CTTHWGFTLC (SEQ ID NO: 68 and 123 of U.S. Pat. No. 9,475,845; herein SEQ ID NO: 1457), CGRRAGGSC (SEQ ID NO: 69 of U.S. Pat. No. 9,475,845; herein SEQ ID NO: 1458), CKGGRAKDC (SEQ ID NO: 70 of U.S. Pat. No. 9,475,845; herein SEQ ID NO: 1459). CVPELGHEC (SEQ ID NO: 71 and 115 of U.S. Pat. No. 9,475,845; herein SEQ ID NO: 1460), CRRETAWAK (SEQ ID NO: 72 of U.S. Pat. No. 9,475,845; herein SEQ ID NO: 1461), VSWFSHRYSPFAVS (SEQ ID NO: 73 of U.S. Pat. No. 9,475,845; herein SEQ ID NO: 1462), GYRDGYAGPILYN (SEQ ID NO: 74 of U.S. Pat. No. 9,475,845; herein SEQ ID NO: 1463), XXXYXXX (SEQ ID NO: 75 of U.S. Pat. No. 9,475,845; herein SEQ ID NO: 1464), YXNW (SEQ ID NO: 76 of U.S. Pat. No. 9,475,845; herein SEQ ID NO: 1465), RPLPPLP (SEQ ID NO: 77 of U.S. Pat. No. 9,475,845; herein SEQ ID NO: 1466), APPLPPR (SEQ ID NO: 78 of U.S. Pat. No. 9,475,845; herein SEQ ID NO: 1467), DVFYPYPYASGS (SEQ ID NO: 79 of U.S. Pat. No. 9,475,845; herein SEQ ID NO: 1468), MYWYPY (SEQ ID NO: 80 of U.S. Pat. No. 9,475,845; herein SEQ ID NO: 1469), DITWDQLWDLMK (SEQ ID NO: 81 of U.S. Pat. No. 9,475,845; herein SEQ ID NO: 1470), CWDDXWLC (SEQ ID NO: 82 of U.S. Pat. No. 9,475,845; herein SEQ ID NO: 1471), EWCEYLGGYLRCYA (SEQ ID NO: 83 of U.S. Pat. No. 9,475,845; herein SEQ ID NO: 1472), YXCXXGPXTWXCXP (SEQ ID NO: 84 of U.S. Pat. No. 9,475,845; herein SEQ ID NO: 1473), IEGPTLRQWLAARA (SEQ ID NO: 85 of U.S. Pat. No. 9,475,845; herein SEQ ID NO: 1474), LWXXX (SEQ ID NO: 86 of U.S. Pat. No. 9,475,845; herein SEQ ID NO: 1475). XFXXYLW (SEQ ID NO: 87 of U.S. Pat. No. 9,475,845; herein SEQ ID NO: 1476), SSIISHFRWGLCD (SEQ ID NO: 88 of U.S. Pat. No. 9,475,845; herein SEQ ID NO: 1477), MSRPACPPNDKYE (SEQ ID NO: 89 of U.S. Pat. No. 9,475,845; herein SEQ ID NO: 1478), CLRSGRGC (SEQ ID NO: 90 of U.S. Pat. No. 9,475,845; herein SEQ ID NO: 1479), CHWMFSPWC (SEQ ID NO: 91 of U.S. Pat. No. 9,475,845; herein SEQ ID NO: 1480), WXXF (SEQ ID NO: 92 of U.S. Pat. No. 9,475,845; herein SEQ ID NO: 1481), CSSRLDAC (SEQ ID NO: 93 of U.S. Pat. No. 9,475,845; herein SEQ ID NO: 1482), CLPVASC (SEQ ID NO: 94 of U.S. Pat. No. 9,475,845; herein SEQ ID NO: 1483), CGFECVRQCPERC (SEQ ID NO: 95 of U.S. Pat. No. 9,475,845; herein SEQ ID NO: 1484), CVALCREACGEGC (SEQ ID NO: 96 of U.S. Pat. No. 9,475,845; herein SEQ ID NO: 1485), SWCEPGWCR (SEQ ID NO: 97 of U.S. Pat. No. 9,475,845; herein SEQ ID NO: 1486), YSGKWGW (SEQ ID NO: 98 of U.S. Pat. No. 9,475,845; herein SEQ ID NO: 1487), GLSGGRS (SEQ ID NO: 99 of U.S. Pat. No. 9,475,845; herein SEQ ID NO: 1488), LMLPRAD (SEQ ID NO: 100 of U.S. Pat. No. 9,475,845; herein SEQ ID NO: 1489), CSCFRDVCC (SEQ ID NO: 101 of U.S. Pat. No. 9,475,845; herein SEQ ID NO: 1490), CRDVVSVIC (SEQ ID NO: 102 of U.S. Pat. No. 9,475,845; herein SEQ ID NO: 1491). MARSGL (SEQ ID NO: 103 of U.S. Pat. No. 9,475,845; herein SEQ ID NO: 1492), MARAKE (SEQ ID NO: 104 of U.S. Pat. No. 9,475,845; herein SEQ ID NO: 1493), MSRTMS (SEQ ID NO: 105 of U.S. Pat. No. 9,475,845; herein SEQ ID NO: 1494), KCCYSL (SEQ ID NO: 106 of U.S. Pat. No. 9,475,845; herein SEQ ID NO: 1495), MYWGDSHWLQYWYE (SEQ ID NO: 107 of U.S. Pat. No. 9,475,845; herein SEQ ID NO: 1496), MQLPLAT (SEQ ID NO: 108 of U.S. Pat. No. 9,475,845; herein SEQ ID NO: 1497), EWLS (SEQ ID NO: 109 of U.S. Pat. No. 9,475,845; herein SEQ ID NO: 1498), SNEW (SEQ ID NO: 110 of U.S. Pat. No. 9,475,845; herein SEQ ID NO: 1499), TNYL (SEQ ID NO: 11 of U.S. Pat. No. 9,475,845; herein SEQ ID NO: 1500), WDLAWMFRLPVG (SEQ ID NO: 113 of U.S. Pat. No. 9,475,845; herein SEQ ID NO: 1501), CTVALPGGYVRVC (SEQ ID NO: 114 of U.S. Pat. No. 9,475,845; herein SEQ ID NO: 1502), CVAYCIEHHCWTC (SEQ ID NO: 116 of U.S. Pat. No. 9,475,845; herein SEQ ID NO: 1503), CVFAHNYDYLVC (SEQ ID NO: 117 of U.S. Pat. No. 9,475,845; herein SEQ ID NO: 1504), CVFTSNYAFC (SEQ ID NO: 118 of U.S. Pat. No. 9,475,845; herein SEQ ID NO: 1505), VHSPNKK (SEQ ID NO: 119 of U.S. Pat. No. 9,475,845; herein SEQ ID NO: 1506). CRGDGWC (SEQ ID NO: 120 of U.S. Pat. No. 9,475,845; herein SEQ ID NO: 1507). XRGCDX (SEQ ID NO: 121 of U.S. Pat. No. 9,475,845; herein SEQ ID NO: 1508), PXXX (SEQ ID NO: 122 of U.S. Pat. No. 9,475,845; herein SEQ ID NO: 1509), SGKGPRQITAL (SEQ ID NO: 124 of U.S. Pat. No. 9,475,845; herein SEQ ID NO: 1510), AAAAAAAAAXXXXX (SEQ ID NO: 125 of U.S. Pat. No. 9,475,845; herein SEQ ID NO: 1511), VYMSPF (SEQ ID NO: 126 of U.S. Pat. No. 9,475,845; herein SEQ ID NO: 1512), ATWLPPR (SEQ ID NO: 127 of U.S. Pat. No. 9,475,845; herein SEQ ID NO: 1513), HTMYYHHYQHHL (SEQ ID NO: 128 of U.S. Pat. No. 9,475,845; herein SEQ ID NO: 1514), SEVGCRAGPLQWLCEKYFG (SEQ ID NO: 129 of U.S. Pat. No. 9,475,845; herein SEQ ID NO: 1515), CGLLPVGRPDRNVWRWLC (SEQ ID NO: 130 of U.S. Pat. No. 9,475,845; herein SEQ ID NO: 1516), CKGQCDRFKGLPWEC (SEQ ID NO: 131 of U.S. Pat. No. 9,475,845; herein SEQ ID NO: 1517), SGRSA (SEQ ID NO: 132 of U.S. Pat. No. 9,475,845; herein SEQ ID NO: 1518), WGFP (SEQ ID NO: 133 of U.S. Pat. No. 9,475,845; herein SEQ ID NO: 1519), AEPMPHSLNFSQYLWYT (SEQ ID NO: 134 of U.S. Pat. No. 9,475,845; herein SEQ ID NO: 1520), WAYXSP (SEQ ID NO: 135 of U.S. Pat. No. 9,475,845; herein SEQ ID NO: 1521), TELLQAR (SEQ ID NO: 136 of U.S. Pat. No. 9,475,845; herein SEQ ID NO: 1522), AYTKCSRQWRTCMTTH (SEQ ID NO: 137 of U.S. Pat. No. 9,475,845; herein SEQ ID NO: 1523), PQNSKIPGPTFLDPH (SEQ ID NO: 138 of U.S. Pat. No. 9,475,845; herein SEQ ID NO: 1524), SMEPALPDWWWKMFK (SEQ ID NO: 139 of U.S. Pat. No. 9,475,845; herein SEQ ID NO: 1525), ANTPCGPYTHDCPVKR (SEQ ID NO: 140 of U.S. Pat. No. 9,475,845; herein SEQ ID NO: 1526), TACHQHVRMVRP (SEQ ID NO: 141 of U.S. Pat. No. 9,475,845; herein SEQ ID NO: 1527), VPWMEPAYQRFL (SEQ ID NO: 142 of U.S. Pat. No. 9,475,845; herein SEQ ID NO: 1528), DPRATPGS (SEQ ID NO: 143 of U.S. Pat. No. 9,475,845; herein SEQ ID NO: 1529), FRPNRAQDYNTN (SEQ ID NO: 144 of U.S. Pat. No. 9,475,845; herein SEQ ID NO: 1530), CTKNSYLMC (SEQ ID NO: 145 of U.S. Pat. No. 9,475,845; herein SEQ ID NO: 1531), CXXTXXXGXGC (SEQ ID NO: 146 of U.S. Pat. No. 9,475,845; herein SEQ ID NO: 1532), CPIEDRPMC (SEQ ID NO: 147 of U.S. Pat. No. 9,475,845; herein SEQ ID NO: 1533), HEWSYLAPYPWF (SEQ ID NO: 148 of U.S. Pat. No. 9,475,845; herein SEQ ID NO: 1534), MCPKHPLGC (SEQ ID NO: 149 of U.S. Pat. No. 9,475,845; herein SEQ ID NO: 1535), RMWPSSTVNLSAGRR (SEQ ID NO: 150 of U.S. Pat. No. 9,475,845; herein SEQ ID NO: 1536), SAKTAVSQRVWLPSHRGGEP (SEQ ID NO: 151 of U.S. Pat. No. 9,475,845; herein SEQ ID NO: 1537), KSREHVNNSACPSKRITAAL (SEQ ID NO: 152 of U.S. Pat. No. 9,475,845; herein SEQ ID NO: 1538), EGFR (SEQ ID NO: 153 of U.S. Pat. No. 9,475,845; herein SEQ ID NO: 1539), AGLGVR (SEQ ID NO: 154 of U.S. Pat. No. 9,475,845; herein SEQ ID NO: 1540), GTRQGHTMRLGVSDG (SEQ ID NO: 155 of U.S. Pat. No. 9,475,845; herein SEQ ID NO: 1541), IAGLATPGWSHWLAL (SEQ ID NO: 156 of U.S. Pat. No. 9,475,845; herein SEQ ID NO: 1542), SMSIARL (SEQ ID NO: 157 of U.S. Pat. No. 9,475,845; herein SEQ ID NO: 1543), HTFEPGV (SEQ ID NO: 158 of U.S. Pat. No. 9,475,845; herein SEQ ID NO: 1544), NTSLKRISNKRIRRK (SEQ ID NO: 159 of U.S. Pat. No. 9,475,845; herein SEQ ID NO: 1545), LRIKRKRRKRKKTRK (SEQ ID NO: 160 of U.S. Pat. No. 9,475,845; herein SEQ ID NO: 1546), GGG, GFS. LWS. EGG, LLV, LSP, LBS, AGG, GRR, GGH and GTV.

[0078] In one embodiment, the AAV serotype may be, or may have a sequence as described in U.S. Patent Application Publication No. US 20160369298, the contents of which are herein incorporated by reference in their entirety, such as, but not limited to, site-specific mutated capsid protein of AAV2 (SEQ ID NO: 97 of US 20160369298; herein SEQ ID NO: 1547) or variants thereof, wherein the specific site is at least one site selected from sites R447, G453, S578, N587, N587+1, S662 of VP or fragment thereof.

[0079] Further, any of the mutated sequences described in US 20160369298, may be or may have, but not limited to, any of the following sequences SDSGASN (SEQ ID NO: 1 and SEQ ID NO: 231 of US20160369298; herein SEQ ID NO: 1548), SPSGASN (SEQ ID NO: 2 of US20160369298; herein SEQ ID NO: 1549), SHSGASN (SEQ ID NO: 3 of US20160369298; herein SEQ ID NO: 1550), SRSGASN (SEQ ID NO: 4 of US20160369298; herein SEQ ID NO: 1551), SKSGASN (SEQ ID NO: 5 of US20160369298; herein SEQ ID NO: 1552), SNSGASN (SEQ ID NO: 6 of US20160369298; herein SEQ ID NO: 1553), SGSGASN (SEQ ID NO: 7 of US20160369298; herein SEQ ID NO: 1554), SASGASN (SEQ ID NO: 8, 175, and 221 of US20160369298; herein SEQ ID NO: 1555), SESGTSN (SEQ ID NO: 9 of US20160369298; herein SEQ ID NO: 1556), STTGGSN (SEQ ID NO: 10 of US20160369298; herein SEQ ID NO: 1557). SSAGSTN (SEQ ID NO: 11 of US20160369298; herein SEQ ID NO: 1558), NNDSQA (SEQ ID NO: 12 of US20160369298; herein SEQ ID NO: 1559), NNRNQA (SEQ ID NO: 13 of US20160369298; herein SEQ ID NO: 1560), NNNKQA (SEQ ID NO: 14 of US20160369298; herein SEQ ID NO: 1561), NAKRQA (SEQ ID NO: 15 of US20160369298; herein SEQ ID NO: 1562), NDEHQA (SEQ ID NO: 16 of US20160369298; herein SEQ ID NO: 1563), NTSQKA (SEQ ID NO: 17 of US20160369298; herein SEQ ID NO: 1564), YYLSRTNTPSGTDTQSRLVFSQAGA (SEQ ID NO: 18 of US20160369298; herein SEQ ID NO: 1565), YYLSRTNTDSGTETQSGLDFSQAGA (SEQ ID NO: 19 of US20160369298; herein SEQ ID NO: 1566). YYLSRTNTESGTPTQSALEFSQAGA (SEQ ID NO: 20 of US20160369298; herein SEQ ID NO: 1567), YYLSRTNTHSGTHTQSPLHFSQAGA (SEQ ID NO: 21 of US20160369298; herein SEQ ID NO: 1568), YYLSRTNTSSGTITISHLIFSQAGA (SEQ ID NO: 22 of US20160369298; herein SEQ ID NO: 1569). YYLSRTNTRSGIMTKSSLMFSQAGA (SEQ ID NO: 23 of US20160369298; herein SEQ ID NO: 1570), YYLSRTNTKSGRKTLSNLSFSQAGA (SEQ ID NO: 24 of US20160369298; herein SEQ ID NO: 1571), YYLSRTNDGSGPVTPSKLRFSQRGA (SEQ ID NO: 25 of US20160369298; herein SEQ ID NO: 1572), YYLSRTNAASGHATHSDLKFSQPGA (SEQ ID NO: 26 of US20160369298; herein SEQ ID NO: 1573), YYLSRTNGQAGSLTMSELGFSQVGA (SEQ ID NO: 27 of US20160369298; herein SEQ ID NO: 1574), YYLSRTNSTGGNQTTSQLLFSQLSA (SEQ ID NO: 28 of US20160369298; herein SEQ ID NO: 1575), YFLSRTNNNTGLNTNSTLNFSQGRA (SEQ ID NO: 29 of US20160369298; herein SEQ ID NO: 1576), SKTGADNNNSEYSWTG (SEQ ID NO: 30 of US20160369298; herein SEQ ID NO: 1577). SKTDADNNNSEYSWTG (SEQ ID NO: 31 of US20160369298; herein SEQ ID NO: 1578), SKTEADNNNSEYSWTG (SEQ ID NO: 32 of US20160369298; herein SEQ ID NO: 1579), SKTPADNNNSEYSWTG (SEQ ID NO: 33 of US20160369298; herein SEQ ID NO: 1580), SKTHADNNNSEYSWTG (SEQ ID NO: 34 of US20160369298; herein SEQ ID NO: 1581), SKTQADNNNSEYSWTG (SEQ ID NO: 35 of US20160369298; herein SEQ ID NO: 1582), SKTIADNNNSEYSWTG (SEQ ID NO: 36 of US20160369298; herein SEQ ID NO: 1583), SKTMADNNNSEYSWTG (SEQ ID NO: 37 of US20160369298; herein SEQ ID NO: 1584), SKTRADNNNSEYSWTG (SEQ ID NO: 38 of US20160369298; herein SEQ ID NO: 1585), SKTNADNNNSEYSWTG (SEQ ID NO: 39 of US20160369298; herein SEQ ID NO: 1586), SKTVGRNNNSEYSWTG (SEQ ID NO: 40 of US20160369298; herein SEQ ID NO: 1587), SKTADRNNNSEYSWTG (SEQ ID NO: 41 of US20160369298; herein SEQ ID NO: 1588), SKKLSQNNNSKYSWQG (SEQ ID NO: 42 of US20160369298; herein SEQ ID NO: 1589), SKPTTGNNNSDYSWPG (SEQ ID NO: 43 of US20160369298; herein SEQ ID NO: 1590), STQKNENNNSNYSWPG (SEQ ID NO: 44 of US20160369298; herein SEQ ID NO: 1591), HKDDEGKF (SEQ ID NO: 45 of US20160369298; herein SEQ ID NO: 1592), HKDDNRKF (SEQ ID NO: 46 of US20160369298; herein SEQ ID NO: 1593), HKDDTNKF (SEQ ID NO: 47 of US20160369298; herein SEQ ID NO: 1594), HEDSDKNF (SEQ ID NO: 48 of US20160369298; herein SEQ ID NO: 1595), HRDGADSF (SEQ ID NO: 49 of US20160369298; herein SEQ ID NO: 1596), HGDNKSRF (SEQ ID NO: 50 of US20160369298; herein SEQ ID NO: 1597), KQGSEKTNVDFEEV (SEQ ID NO: 51 of US20160369298; herein SEQ ID NO: 1598), KQGSEKTNVDSEEV (SEQ ID NO: 52 of US20160369298; herein SEQ ID NO: 1599), KQGSEKTNVDVEEV (SEQ ID NO: 53 of US20160369298; herein SEQ ID NO: 1600), KQGSDKTNVDDAGV (SEQ ID NO: 54 of US20160369298; herein SEQ ID NO: 1601), KQGSSKTNVDPREV (SEQ ID NO: 55 of US20160369298; herein SEQ ID NO: 1602), KQGSRKTNVDHKQV (SEQ ID NO: 56 of US20160369298; herein SEQ ID NO: 1603), KQGSKGGNVDTNRV (SEQ ID NO: 57 of US20160369298; herein SEQ ID NO: 1604), KQGSGEANVDNGDV (SEQ ID NO: 58 of US20160369298; herein SEQ ID NO: 1605), KQDAAADNIDYDHV (SEQ ID NO: 59 of US20160369298; herein SEQ ID NO: 1606), KQSGTRSNAAASSV (SEQ ID NO: 60 of US20160369298; herein SEQ ID NO: 1607), KENTNTNDTELTNV (SEQ ID NO: 61 of US20160369298; herein SEQ ID NO: 1608), QRGNNVAATADVNT (SEQ ID NO: 62 of US20160369298; herein SEQ ID NO: 1609), QRGNNEAATADVNT (SEQ ID NO: 63 of US20160369298; herein SEQ ID NO: 1610), QRGNNPAATADVNT (SEQ ID NO: 64 of US20160369298; herein SEQ ID NO: 1611), QRGNNHAATADVNT (SEQ ID NO: 65 of US20160369298; herein SEQ ID NO: 1612), QEENNIAATPGVNT (SEQ ID NO: 66 of US20160369298; herein SEQ ID NO: 1613), QPPNNMAATHEVNT (SEQ ID NO: 67 of US20160369298; herein SEQ ID NO: 1614), QHHNNSAATTIVNT (SEQ ID NO: 68 of US20160369298; herein SEQ ID NO: 1615), QTTNNRAAFNMVET (SEQ ID NO: 69 of US20160369298; herein SEQ ID NO: 1616), QKKNNNAASKKVAT (SEQ ID NO: 70 of US20160369298; herein SEQ ID NO: 1617), QGGNNKAADDAVKT (SEQ ID NO: 71 of US20160369298; herein SEQ ID NO: 1618), QAAKGGAADDAVKT (SEQ ID NO: 72 of US20160369298; herein SEQ ID NO: 1619), QDDRAAAANESVDT (SEQ ID NO: 73 of US20160369298; herein SEQ ID NO: 1620), QQQHDDAAYQRVHT (SEQ ID NO: 74 of US20160369298; herein SEQ ID NO: 1621), QSSSSLAAVSTVQT (SEQ ID NO: 75 of US20160369298; herein SEQ ID NO: 1622), QNNQTTAAIRNVTT (SEQ ID NO: 76 of US20160369298; herein SEQ ID NO: 1623), NYNKKSDNVDFT (SEQ ID NO: 77 of US20160369298; herein SEQ ID NO: 1624), NYNKKSENVDFT (SEQ ID NO: 78 of US20160369298; herein SEQ ID NO: 1625), NYNKKSLNVDFT (SEQ ID NO: 79 of US20160369298; herein SEQ ID NO: 1626), NYNKKSPNVDFT (SEQ ID NO: 80 of US20160369298; herein SEQ ID NO: 1627), NYSKKSHCVDFT (SEQ ID NO: 81 of US20160369298; herein SEQ ID NO: 1628), NYRKTiYVDFT (SEQ ID NO: 82 of US20160369298; herein SEQ ID NO: 1629), NYKEKKDVHFT (SEQ ID NO: 83 of US20160369298; herein SEQ ID NO: 1630), NYGHRAIVQFT (SEQ ID NO: 84 of US20160369298; herein SEQ ID NO: 1631), NYANHQFVVCT (SEQ ID NO: 85 of US20160369298; herein SEQ ID NO: 1632), NYDDDPTGVLLT (SEQ ID NO: 86 of US20160369298; herein SEQ ID NO: 1633), NYDDPTGVLLT (SEQ ID NO: 87 of US20160369298; herein SEQ ID NO: 1634), NFEQQNSVEWT (SEQ ID NO: 88 of US20160369298; herein SEQ ID NO: 1635), SQSGASN (SEQ ID NO: 89 and SEQ ID NO: 241 of US20160369298; herein SEQ ID NO: 1636), NNGSQA (SEQ ID NO: 90 of US20160369298; herein SEQ ID NO: 1637), YYLSRTNTPSGTITWSRLQFSQAGA (SEQ ID NO: 91 of US20160369298; herein SEQ ID NO: 1638), SKTSADNNNSEYSWTG (SEQ ID NO: 92 of US20160369298; herein SEQ ID NO: 1639),1HKDDEEKF (SEQ ID NO: 93, 209, 214, 219, 224, 234, 239, and 244 of US20160369298; herein SEQ ID NO: 1640), KQGSEKTNVDIEEV (SEQ ID NO: 94 of US20160369298; herein SEQ ID NO: 1641), QRGNNQAATADVNT (SEQ ID NO: 95 of US20160369298; herein SEQ ID NO: 1642), NYNKKSVNVDFT (SEQ ID NO: 96 of US20160369298; herein SEQ ID NO: 1643), SQSGASNYNTPSGTTTQSRLQFSTSADNNNSEYSWTGATKYH (SEQ ID NO: 106 of US20160369298; herein SEQ ID NO: 1644), SASGASNFNSEGGSLTQSSLGFSTDGENNNSDFSWTGATKYH (SEQ ID NO: 107 of US20160369298; herein SEQ ID NO: 1645), SQSGASNYNTPSGTITQSRLQFSTDGENNNSDFSWTGATKYH (SEQ ID NO: 108 of US20160369298; herein SEQ ID NO: 1646), SASGASNYNTPSGTITTQSRLQFSTSADNNNSEFSWPGATTYH (SEQ ID NO: 109 of US20160369298; herein SEQ ID NO: 1647), SQSGASNFNSEGGSLTQSSLGFSTDGENNNSDFSWTGATKYH (SEQ ID NO: 110 of US20160369298; herein SEQ ID NO: 1648), SASGASNYNTPSGSLTQSSLGFSTDGENNNSDFSWTGATKYH (SEQ ID NO: 111 of US20160369298; herein SEQ ID NO: 1649), SQSGASNYNTPSGTTTQSRLQFSTSADNNNSDFSWTGATKYH (SEQ ID NO: 112 of US20160369298; herein SEQ ID NO: 1650), SGAGASNFNSEGGSLTQSSLGFSTDGENNNSDFSWTGATKYH (SEQ ID NO: 113 of US20160369298; herein SEQ ID NO: 1651), SGAGASN (SEQ ID NO: 176 of US20160369298; herein SEQ ID NO: 1652), NSEGGSLTQSSLGFS (SEQ ID NO: 177, 185, 193 and 202 of US20160369298; herein SEQ ID NO: 1653), TDGENNNSDFS (SEQ ID NO: 178 of US20160369298; herein SEQ ID NO: 1654), SEFSWPGATT (SEQ ID NO: 179 of US20160369298; herein SEQ ID NO: 1655), TSADNNNSDFSWT (SEQ ID NO: 180 of US20160369298; herein SEQ ID NO: 1656), SQSGASNY (SEQ ID NO: 181, 187, and 198 of US20160369298; herein SEQ ID NO: 1657), NTPSGTITQSRLQFS (SEQ ID NO: 182, 188, 191, and 199 of US20160369298; herein SEQ ID NO: 1658), TSADNNNSEYSWTGATKYH (SEQ ID NO: 183 of US20160369298; herein SEQ ID NO: 1659), SASGASNF (SEQ ID NO: 184 of US20160369298; herein SEQ ID NO: 1660), TDGENNNSDFSWTGATKYH (SEQ ID NO: 186, 189, 194, 197, and 203 of US20160369298; herein SEQ ID NO: 1661), SASGASNY (SEQ ID NO: 190 and SEQ ID NO: 195 of US20160369298; herein SEQ ID NO: 1662), TSADNNNSEFSWPGATTYH (SEQ ID NO: 192 of US20160369298; herein SEQ ID NO: 1663), NTPSGSLTQSSLGFS (SEQ ID NO: 196 of US20160369298; herein SEQ ID NO: 1664), TSADNNNSDFSWTGATKYH (SEQ ID NO: 200 of US20160369298; herein SEQ ID NO: 1665), SGAGASNF (SEQ ID NO: 201 of US20160369298; herein SEQ ID NO: 1666), CTCCAGVVSVVSMRSRVCVNSGCAGCTDHCVVSRNSGTCVMSACACAA (SEQ ID NO: 204 of US20160369298; herein SEQ ID NO: 1667), CTCCAGAGAGGCAACAGACAAGCAGCTACCGCAGATGTCAACACACAA (SEQ ID NO: 205 of US20160369298; herein SEQ ID NO: 1668), SAAGASN (SEQ ID NO: 206 of US20160369298; herein SEQ ID NO: 1669), YFLSRTNTESGSTTQSTLRFSQAG (SEQ ID NO: 207 of US20160369298; herein SEQ ID NO: 1670), SKTSADNNNSDFS (SEQ ID NO: 208, 228, and 253 of US20160369298; herein SEQ ID NO: 1671), KQGSEKTDVDIDKV (SEQ ID NO: 210 of US20160369298; herein SEQ ID NO: 1672), STAGASN (SEQ ID NO: 211 of US20160369298; herein SEQ ID NO: 1673), YFLSRTNTISGIETQSTLRFSQAG (SEQ ID NO: 212 and SEQ ID NO: 247 of US20160369298; herein SEQ ID NO: 1674), SKTDGENNNSDFS (SEQ ID NO: 213 and SEQ ID NO: 248 of US20160369298; herein SEQ ID NO: 1675), KQGAAADDVEIDGV (SEQ ID NO: 215 and SEQ ID NO: 250 of US20160369298; herein SEQ ID NO: 1676), SEAGASN (SEQ ID NO: 216 of US20160369298; herein SEQ ID NO: 1677), YYLSRTNTPSGTTTQSRLQFSQAG (SEQ ID NO: 217, 232 and 242 of US20160369298; herein SEQ ID NO: 1678), SKTSADNNNSEYS (SEQ ID NO: 218, 233, 238, and 243 of US20160369298; herein SEQ ID NO: 1679), KQGSEKTNVDIEKV (SEQ ID NO: 220, 225 and 245 of US20160369298; herein SEQ ID NO: 1680), YFLSRTNDASGSDTKSTLLFSQAG (SEQ ID NO: 222 of US20160369298; herein SEQ ID NO: 1681), STTPSENNNSEYS (SEQ ID NO: 223 of US20160369298; herein SEQ ID NO: 1682), SAAGATN (SEQ ID NO: 226 and SEQ ID NO: 251 of US20160369298; herein SEQ ID NO: 1683), YFLSRTNGEAGSATLSELRFSQAG (SEQ ID NO: 227 of US20160369298; herein SEQ ID NO: 1684), HGDDADRF (SEQ ID NO: 229 and SEQ ID NO: 254 of US20160369298; herein SEQ ID NO: 1685), KQGAEKSDVEVDRV (SEQ ID NO: 230 and SEQ ID NO: 255 of US20160369298; herein SEQ ID NO: 1686), KQDSGGDNIDIDQV (SEQ ID NO: 235 of US20160369298; herein SEQ ID NO: 1687), SDAGASN (SEQ ID NO: 236 of US20160369298; herein SEQ ID NO: 1688), YFLSRTNTEGGHDTQSTLRFSQAG (SEQ ID NO: 237 of US20160369298; herein SEQ ID NO: 1689), KEDGGGSDVAIDEV (SEQ ID NO: 240 of US20160369298; herein SEQ ID NO: 1690), SNAGASN (SEQ ID NO: 246 of US20160369298; herein SEQ ID NO: 1691), and YFLSRTNGEAGSATLSELRFSQPG (SEQ ID NO: 252 of US20160369298; herein SEQ ID NO: 1692). Non-limiting examples of nucleotide sequences that may encode the amino acid mutated sites include the following, AGCVVMDCAGGARSCASCAAC (SEQ ID NO: 97 of US20160369298; herein SEQ ID NO: 1693), AACRACRRSMRSMAGGCA (SEQ ID NO: 98 of US20160369298; herein SEQ ID NO: 1694), CACRRGGACRRCRMSRRSARS1T (SEQ ID NO: 99 of US20160369298; herein SEQ ID NO: 1695), TATTCTTGAGCAGAACAAACRVCVVSRSCGGAMNCVHSACGMHSTCAVVSCTTV DSTITTCTCAGSBCRGSGCG (SEQ ID NO: 100 of US20160369298; herein SEQ ID NO: 1696), TCAAMAMMAVNSRVCSRSAACAACAACAGTRASTTCTCGTGGMMAGGA (SEQ ID NO: 101 of US20160369298; herein SEQ ID NO: 1697), AAGSAARRCRSCRVSRVARVCRATRYCGMSNHCRVMVRSGTC (SEQ ID NO: 102 of US20160369298; herein SEQ ID NO: 1698), CAGVVSVVSMRSRVCVNSGCAGCTDHCVVSRNSGTCVMSACA (SEQ ID NO: 103 of US20160369298; herein SEQ ID NO: 1699), AACTWCRVSVASMVSVHSDDTGTGSWSTKSACT (SEQ ID NO: 104 of US20160369298; herein SEQ ID NO: 1700), TTGTTGAACATCACCACGTGACGCACGTTC (SEQ ID NO: 256 of US20160369298; herein SEQ ID NO: 1701), TCCCCGTGGTTCTACTACATAATGTGGCCG (SEQ ID NO: 257 of US20160369298; herein SEQ ID NO: 1702), TTCCACACTCCGTITTGGATAATGTTGAAC (SEQ ID NO: 258 of US20160369298; herein SEQ ID NO: 1703), AGGGACATCCCCAGCTCCATGCTGTGGTCG (SEQ ID NO: 259 of US20160369298; herein SEQ ID NO: 1704), AGGGACAACCCCTCCGACTCGCCCTAATCC (SEQ ID NO: 260 of US20160369298; herein SEQ ID NO: 1705), TCCTAGTAGAAGACACCCTCTCACTGCCCG (SEQ ID NO: 261 of US20160369298; herein SEQ ID NO: 1706), AGTACCATGTACACCCACTCTCCCAGTGCC (SEQ ID NO: 262 of US20160369298; herein SEQ ID NO: 1707), ATATGGACGTTCATGCTGATCACCATACCG (SEQ ID NO: 263 of US20160369298; herein SEQ ID NO: 1708), AGCAGGAGCTCCTTGGCCTCAGCGTGCGAG (SEQ ID NO: 264 of US20160369298; herein SEQ ID NO: 1709), ACAAGCAGCTTCACTATGACAACCACTGAC (SEQ ID NO: 265 of US20160369298; herein SEQ ID NO: 1710), CAGCCTAGGAACTGGCTTCCTGGACCCTGTTACCGCCAGCAGAGAGTCTCAAMA MMAVNSRVCSRSAACAACAACAGTRASTTCTCCTGGMMAGGAGCTACCAAGTAC CACCTCAATGGCAGAGACTCTCTGGTGAATCCCGGACCAGCTATGGCAAGCCAC RRGGACRRCRMSRRSARSTITITCCTCAGAGCGGGGTTCTCATCTITGGGAAGSA ARRCRSCRVSRVARVCRATRYCGMSNHCRVMVRSGTCATGATTACAGACGAAGA GGAGATCTGGAC (SEQ ID NO: 266 of US20160369298; herein SEQ ID NO: 1711), TGGGACAATGGCGGTCGTCTCTCAGAGITKTKKT (SEQ ID NO: 267 of US20160369298; herein SEQ ID NO: 1712), AGAGGACCKKTCCTCGATGGTTCATGGTGGAGTTA (SEQ ID NO: 268 of US20160369298; herein SEQ ID NO: 1713), CCACTTAGGGCCTGGTCGATACCGTTCGGTG (SEQ ID NO: 269 of US20160369298; herein SEQ ID NO: 1714), and TCTCGCCCCAAGAGTAGAAACCCTTCSTTYYG (SEQ ID NO: 270 of US20160369298; herein SEQ ID NO: 1715).

[0080] In some embodiments, the AAV serotype may comprise an ocular cell targeting peptide as described in International Patent Publication WO2016134375, the contents of which are herein incorporated by reference in their entirety, such as, but not limited to SEQ ID NO: 9, and SEQ ID NO:10 of WO2016134375. Further, any of the ocular cell targeting peptides or amino acids described in WO2016134375, may be inserted into any parent AAV serotype, such as, but not limited to, AAV2 (SEQ ID NO:8 of WO2016134375; herein SEQ ID NO: 1716), or AAV9 (SEQ ID NO: 11 of WO2016134375; herein SEQ ID NO: 1717). In some embodiments, modifications, such as insertions are made in AAV2 proteins at P34-A35, T138-A139. A139-P140, G453-T454, N587-R588, and/or R588-Q589. In certain embodiments, insertions are made at D384, G385, 1560, T561, N562, E563, E564, E565, N704, and/or Y705 of AAV9. The ocular cell targeting peptide may be, but is not limited to, any of the following amino acid sequences, GSTPPPM (SEQ ID NO: 1 of WO2016134375; herein SEQ ID NO: 1718), or GETRAPL (SEQ ID NO: 4 of WO2016134375; herein SEQ ID NO: 1719).

[0081] In some embodiments, the AAV serotype may be modified as described in the U.S. Patent Application Publication No. US 20170145405, the contents of which are herein incorporated by reference in their entirety. AAV serotypes may include, modified AAV2 (e.g., modifications at Y444F, Y500F, Y730F and/or S662V), modified AAV3 (e.g., modifications at Y705F, Y731F and/or T492V), and modified AAV6 (e.g., modifications at S663V and/or T492V).

[0082] In some embodiments, the AAV serotype may be modified as described in the International Publication No. WO2017083722, the contents of which are herein incorporated by reference in their entirety. AAV serotypes may include, AAV1 (Y705+731F+T492V). AAV2 (Y444+500+730F+T491V), AAV3 (Y705+731F), AAV5, AAV5 (Y436+693+719F), AAV6 (VP3 variant Y705F/Y731F/T492V), AAV8 (Y733F), AAV9, AAV9 (VP3 variant Y731F), and AAV10 (Y733F).

[0083] In some embodiments, the AAV serotype may comprise, as described in International Patent Publication No. WO2017015102, the contents of which are herein incorporated by reference in their entirety, an engineered epitope comprising the amino acids SPAKFA (SEQ ID NO: 24 of WO2017015102; herein SEQ ID NO: 1720) or NKDKLN (SEQ ID NO:2 of WO2017015102; herein SEQ ID NO: 1721). The epitope may be inserted in the region of amino acids 665 to 670 based on the numbering of the VP capsid of AAV8 (SEQ ID NO: 3 of WO2017015102) and/or residues 664 to 668 of AAV3B (SEQ ID NO: 3).

[0084] In one embodiment, the AAV serotype may be, or may have a sequence as described in International Patent Publication No. WO2017058892, the contents of which are herein incorporated by reference in their entirety, such as, but not limited to, AAV variants with capsid proteins that may comprise a substitution at one or more (e.g., 2, 3, 4, 5, 6, or 7) of amino acid residues 262-268, 370-379, 451-459, 472-473, 493-500, 528-534, 547-552, 588-597, 709-710, 716-722 of AAV1, in any combination, or the equivalent amino acid residues in AAV2, AAV3, AAV4, AAV5, AAV6, AAV7, AAV8, AAV9, AAV10, AAV11, AAV12, AAVrh8, AAVrh10, AAVrh32.33, bovine AAV or avian AAV. The amino acid substitution may be, but is not limited to, any of the amino acid sequences described in WO2017058892. In one embodiment, the AAV may comprise an amino acid substitution at residues 256L, 258K, 259Q, 261S, 263A, 264S, 265T, 266G, 272H, 385S, 386Q S472R, V473D, N500E547S, 709A, 710N, 716D, 717N, 718N, 720L, A456T, Q457T, N458Q, K459S, T492S, K493A, S586R, S587G, S588N, T589R and/or 722T of AAV1 (SEQ ID NO: 1 of WO2017058892) in any combination, 244N, 246Q, 248R, 249E, 2501, 251K, 252S, 253G, 254S, 255V, 256D, 263Y, 377E, 378N, 453L, 456R, 532Q, 533P, 535N, 536P, 537G, 538T, 539T, 540A, 541T, 542Y, 543L, 546N, 653V, 654P, 656S, 697Q, 698F, 704D, 7055, 706T, 707G, 708E, 709Y and/or 710R of AAV5 (SEQ ID NO:5 of WO2017058892) in any combination, 248R, 316V, 317Q, 318D, 319S, 443N, 530N, 531S, 532Q, 533P, 534A, 535N, 540A, 541 T, 542Y, 543L, 545G, 546N, 697Q, 704D, 706T, 708E, 709Y and/or 710R of AAV5 (SEQ ID NO: 5 of WO2017058892) in any combination, 264S, 266G, 269N, 272H, 457Q, 588S and/or 5891 of AAV6 (SEQ ID NO:6 WO2017058892) in any combination, 457T, 459N, 496G, 499N, 500N, 589Q, 590N and/or 592A of AAV8 (SEQ ID NO: 8 WO2017058892) in any combination, 451I, 452N, 453G, 454S, 455G, 456Q, 457N and/or 458Q of AAV9 (SEQ ID NO: 9 WO2017058892) in any combination.

[0085] In some embodiments, the AAV may include a sequence of amino acids at positions 155, 156 and 157 of VP1 or at positions 17, 18, 19 and 20 of VP2, as described in International Publication No. WO 2017066764, the contents of which are herein incorporated by reference in their entirety. The sequences of amino acid may be, but not limited to, N-S-S, S-X-S, S-S-Y, N-X-S, N-S-Y, S-X-Y and N-X-Y, where N. X and Y are, but not limited to, independently non-serine, or non-threonine amino acids, wherein the AAV may be, but not limited to AAV1, AAV2, AAV3, AAV4, AAV5, AAV6, AAV7, AAV8, AAV9, AAV10, AAV11 and AAV12. In some embodiments, the AAV may include a deletion of at least one amino acid at positions 156, 157 or 158 of VP1 or at positions 19, 20 or 21 of VP2, wherein the AAV may be, but not limited to AAV1, AAV2, AAV3, AAV4, AAV5, AAV6, AAV7, AAV8, AAV9, AAV10, AAV11 and AAV12.

[0086] In one embodiment, the AAV may be a serotype generated by Cre-recombination-based AAV targeted evolution (CREATE) as described by Deverman et al., (Nature Biotechnology 34(2):204-209 (2016)), the contents of which are herein incorporated by reference in their entirety. In one embodiment, AAV serotypes generated in this manner have improved CNS transduction and/or neuronal and astrocytic tropism, as compared to other AAV serotypes. As non-limiting examples, the AAV serotype may include a peptide such as, but not limited to, PHP.B, PHP.B2, PHP.B3, PHP.A, PHP.S, G2A12, G2A15, G2A3, G2B4, and G2B5. In one embodiment, these AAV serotypes may be AAV9 (SEQ ID NO: 9 or 136) derivatives with a 7-amino acid insert between amino acids 588-589. Non-limiting examples of these 7-amino acid inserts include TLAVPFK (PHP.B; SEQ ID NO: 1260). SVSKPFL (PHP.B2, SEQ ID NO: 1268), FTLTTPK (PHP.B3; SEQ ID NO: 1269), YTLSQGW (PHP.A; SEQ ID NO: 1275), QAVRTSL (PHP.S; SEQ ID NO: 1319), LAKERLS (G2A3; SEQ ID NO: 1320), MNSTKNV (G2B4; SEQ ID NO: 1321), and/or VSGGHHS (G2B5; SEQ ID NO: 1322).

[0087] In one embodiment, the AAV serotype may be as described in Jackson et al (Frontiers in Molecular Neuroscience 9:154 (2016)), the contents of which are herein incorporated by reference in their entirety.

[0088] In the DNA and RNA sequences referenced and/or described herein, the single letter symbol has the following description: A for adenine; C for cytosine; G for guanine; T for thymine U for Uracil; W for weak bases such as adenine or thymine; S for strong nucleotides such as cytosine and guanine; M for amino nucleotides such as adenine and cytosine; K for keto nucleotides such as guanine and thymine; R for purines adenine and guanine; Y for pyrimidine cytosine and thymine; B for any base that is not A (e.g., cytosine, guanine, and thymine); D for any base that is not C (e.g., adenine, guanine, and thymine); H for any base that is not G (e.g., adenine, cytosine, and thymine); V for any base that is not T (e.g., adenine, cytosine, and guanine); N for any nucleotide (which is not a gap); and Z is for zero.

[0089] In any of the amino acid sequences referenced and/or described herein, the single letter symbol has the following description; G (Gly) for Glycine; A (Ala) for Alanine; L (Leu) for Leucine; M (Met) for Methionine; F (Phe) for Phenylalanine; W (Trp) for Tryptophan; K (Lys) for Lysine; Q (Gln) for Glutamine; E(Glu) for Glutamic Acid; S (Scr) for Serine; P (Pro) for Proline; V (Val) for Valine; I (Ile) for Isoleucine; C (Cys) for Cysteine; Y (Tyr) for Tyrosine; H (His) for Histidine; R (Arg) for Arginine; N (Asn) for Asparagine; D (Asp) for Aspartic Acid; T (Thr) for Threonine; B (Asx) for Aspartic acid or Asparagine; J (Xle) for Leucine or Isoleucine; O (Pyl) for Pyrrolysine; U (Sec) for Selenocysteine; X (Xaa) for any amino acid; and Z (Glx) for Glutamine or Glutamic acid.

[0090] In some embodiments, the AAV serotype is PHP.B or AAV9. In some embodiments, the AAV serotype is paired with a synapsin promoter to enhance neuronal transduction, as compared to when more ubiquitous promoters are used (i.e., CBA or CMV).

[0091] In one embodiment, the AAV serotype is a serotype comprising the AAVPHP.N (PHP.N) peptide, or a variant thereof.

[0092] In one embodiment the AAV serotypes is a serotype comprising the AAVPHP.B (PHP.B) peptide, or a variant thereof.

[0093] In one embodiment, the AAV serotype is a serotype comprising the AAVPHP.A (PHP.A) peptide, or a variant thereof.

[0094] In one embodiment, the AAV serotype is a serotype comprising the PHP.S peptide, or a variant thereof.

[0095] In one embodiment, the AAV serotype is a serotype comprising the PHP.B2 peptide, or a variant thereof.

[0096] In one embodiment, the AAV serotype is a serotype comprising the PHP.B3 peptide, or a variant thereof.

[0097] In one embodiment, the AAV serotype is a serotype comprising the G2B4 peptide, or a variant thereof.

[0098] In one embodiment, the AAV serotype is a serotype comprising the G2B5 peptide, or a variant thereof.

[0099] In one embodiment, the AAV serotype is VOY101, or a variant thereof. In one preferred embodiment, the VOY101 comprises the amino acid sequence of SEQ ID NO. 1. In another embodiment, the capsid sequence comprises the nucleic acid sequence of SEQ ID NO. 1809.

[0100] In one embodiment, the AAV serotype is VOY201, or a variant thereof. In one preferred embodiment, the VOY201 comprises the amino acid sequence of SEQ ID NO. 1823. In another embodiment, the capsid sequence comprises the nucleic acid sequence of SEQ ID NO. 1810.

[0101] In one embodiment, the AAV serotype is VOY801, or a variant thereof. In one preferred embodiment, the VOY801 comprises the nucleic acid sequence of SEQ ID NO. 1824.

[0102] In one embodiment, the AAV serotype is VOY101, or a variant thereof. In one preferred embodiment, the VOY101 comprises the nucleic acid sequence of SEQ ID NO. 1825.

[0103] In one embodiment the AAV capsid is one that allows for blood brain barrier penetration following intravenous administration. Non-limiting examples of such AAV capsids include VOY101, VOY201, VOY801, VOY1101 or AAV capsids comprising a peptide insert such as, but not limited to, AAVPHP.N (PHP.N), AAVPHP.B (PHP.B), PHP.S, G2A3, G2B4, G2B5, G2A12, G2A15, PHP.B2, PHP.B3, and AAVPHP.A (PHP.A). In one embodiment, the blood brain barrier penetrating capsid is VOY101. In one embodiment, the blood brain barrier penetrating capsid is VOY201. In one embodiment, the blood brain barrier penetrating capsid is VOY801. In one embodiment, the blood brain barrier penetrating capsid is VOY1101. In one embodiment, the blood brain barrier penetrating capsid comprises the PHP.A peptide insert. In one embodiment, the blood brain barrier penetrating capsid comprises the PHP.B peptide insert. In one embodiment, the blood brain barrier penetrating capsid comprises the PHP.B2 peptide insert. In one embodiment, the blood brain barrier penetrating capsid comprises the PHP.B3 peptide insert. In one embodiment, the blood brain barrier penetrating capsid comprises the G2A3 peptide insert. In one embodiment, the blood brain barrier penetrating capsid comprises the G2B4 peptide insert. In one embodiment, the blood brain barrier penetrating capsid comprises the G2B5 peptide insert. In one embodiment, the blood brain barrier penetrating capsid comprises the PHP.N peptide insert. In one embodiment, the blood brain barrier penetrating capsid comprises the PHP.S peptide insert.

[0104] In one embodiment, the initiation codon for translation of the AAV VP1 capsid protein may be CTG, TTG, or GTG as described in U.S. Pat. No. 8,163,543, the contents of which are herein incorporated by reference in its entirety.

[0105] The present disclosure refers to structural capsid proteins (including VP1, VP2 and VP3) which are encoded by capsid (Cap) genes. These capsid proteins form an outer protein structural shell (i.e. capsid) of a viral vector such as AAV. VP capsid proteins synthesized from Cap polynucleotides generally include a methionine as the first amino acid in the peptide sequence (Met), which is associated with the start codon (AUG or ATG) in the corresponding Cap nucleotide sequence. However, it is common for a first-methionine (Met1) residue or generally any first amino acid (AA1) to be cleaved off after or during polypeptide synthesis by protein processing enzymes such as Met-aminopeptidases. This “Met/AA-clipping” process often correlates with a corresponding acetylation of the second amino acid in the polypeptide sequence (e.g., alanine, valine, serine, threonine, etc.). Met-clipping commonly occurs with VP1 and VP3 capsid proteins but can also occur with VP2 capsid proteins.

[0106] Where the Met/AA-clipping is incomplete, a mixture of one or more (one, two or three) VP capsid proteins comprising the viral capsid may be produced, some of which may include a Met1/AA1 amino acid (Met+/AA+) and some of which may lack a Met1/AA1 amino acid as a result of Met/AA-clipping (Met−/AA−). For further discussion regarding Met/AA-clipping in capsid proteins, see Jin, et al. Direct Liquid Chromatography/Mass Spectrometry Analysis for Complete Characterization of Recombinant Adeno-Associated Virus Capsid Proteins. Hum Gene Ther Methods. 2017 Oct. 28(5):255-267; Hwang, et al. N-Terminal Acetylation of Cellular Proteins Creates Specific Degradation Signals. Science. 2010 Feb. 19, 327(5968): 973-977; the contents of which are each incorporated herein by reference in its entirety.

[0107] According to the present disclosure, references to capsid proteins is not limited to either clipped (Met−/AA−) or unclipped (Met+/AA+) and may, in context, refer to independent capsid proteins, viral capsids comprised of a mixture of capsid proteins, and/or polynucleotide sequences (or fragments thereof) which encode, describe, produce or result in capsid proteins of the present disclosure. A direct reference to a “capsid protein” or “capsid polypeptide” (such as VP1, VP2 or VP2) may also comprise VP capsid proteins which include a Met1/AA1 amino acid (Met+/AA+) as well as corresponding VP capsid proteins which lack the Met1/AA1 amino acid as a result of Met/AA-clipping (Met−/AA−).

[0108] Further according to the present disclosure, a reference to a specific SEQ ID NO: (whether a protein or nucleic acid) which comprises or encodes, respectively, one or more capsid proteins which include a Met1/AA1 amino acid (Met+/AA+) should be understood to teach the VP capsid proteins which lack the Met1/AA1 amino acid as upon review of the sequence, it is readily apparent any sequence which merely lacks the first listed amino acid (whether or not Met1/AA1).

[0109] As a non-limiting example, reference to a VP1 polypeptide sequence which is 736 amino acids in length and which includes a “Met1” amino acid (Met+) encoded by the AUG/ATG start codon may also be understood to teach a VP polypeptide sequence which is 735 amino acids in length and which does not include the “Met1” amino acid (Met−) of the 736 amino acid Met+ sequence. As a second non-limiting example, reference to a VP1 polypeptide sequence which is 736 amino acids in length and which includes an “AA1” amino acid (AA1+) encoded by any NNN initiator codon may also be understood to teach a VP1 polypeptide sequence which is 735 amino acids in length and which does not include the “AA1” amino acid (AA1−) of the 736 amino acid AA1+ sequence.

[0110] References to viral capsids formed from VP capsid proteins (such as reference to specific AAV capsid serotypes), can incorporate VP capsid proteins which include a Met1/AA1 amino acid (Met+/AA1+), corresponding VP capsid proteins which lack the Met1/AA1 amino acid as a result of Met/AA1-clipping (Met−/AA1−), and combinations thereof (Met+/AA1+ and Met−/AA1−).

[0111] As a non-limiting example, an AAV capsid serotype can include VP1 (Met+/AA1+), VP1 (Met−/AA1−), or a combination of VP1 (Met+/AA1+) and VP1 (Met−/AA1−). An AAV capsid serotype can also include VP3 (Met+/AA1+), VP3 (Met−/AA1−), or a combination of VP3 (Met+/AA1+) and VP3 (Met−/AA1−); and can also include similar optional combinations of VP2 (Met+/AA1) and VP2 (Met−/AA1−).

### Viral Genome Component: Inverted Terminal Repeats (ITRs)

[0112] The AAV particles of the present disclosure comprise a viral genome with at least one ITR region and a payload region. In one embodiment, the viral genome has two ITRs. These two ITRs flank the payload region at the 5′ and 3′ ends. The ITRs function as origins of replication comprising recognition sites for replication. ITRs comprise sequence regions which can be complementary and symmetrically arranged. ITRs incorporated into viral genomes of the AAV particles described herein may be comprised of naturally occurring polynucleotide sequences or recombinantly derived polynucleotide sequences.

[0113] The ITRs may be derived from the same serotype as the capsid, selected from any of the serotypes listed in Table 1, or a derivative thereof. The ITR may be of a different serotype than the capsid. In one embodiment, the AAV particle has more than one ITR. In a non-limiting example, the AAV particle has a viral genome comprising two ITRs. In one embodiment, the ITRs are of the same serotype as one another. In another embodiment, the ITRs are of different serotypes. Non-limiting examples include zero, one or both of the ITRs having the same serotype as the capsid. In one embodiment both ITRs of the viral genome of the AAV particle are AAV2 1TRs.

[0114] Independently, each ITR may be about 100 to about 150 nucleotides in length. An ITR may be about 100-105 nucleotides in length, 106-110 nucleotides in length, 111-115 nucleotides in length, 116-120 nucleotides in length, 121-125 nucleotides in length, 126-130 nucleotides in length, 131-135 nucleotides in length, 136-140 nucleotides in length, 141-145 nucleotides in length or 146-150 nucleotides in length. In one embodiment, the ITRs are 140-142 nucleotides in length. Non-limiting examples of ITR length are 102, 105, 130, 140, 141, 142, 145 nucleotides in length, and those having at least at least 90% identity thereto, or 95% identity thereto, or at least 98% identity thereto, or at least 99% identity thereto.

### Viral Genome Component: Promoters

[0115] In one embodiment, the payload region of the viral genome comprises at least one element to enhance the transgene target specificity and expression (See e.g., Powell et al. Viral Expression Cassette Elements to Enhance Transgene Target Specificity and Expression in Gene Therapy, 2015; the contents of which are herein incorporated by reference in their entirety). Non-limiting examples of elements to enhance the transgene target specificity and expression include promoters, endogenous miRNAs, post-transcriptional regulatory elements (PREs), polyadenylation (PolyA) signal sequences and upstream enhancers (USEs), CMV enhancers and introns.

[0116] A person skilled in the art may recognize that expression of the polypeptides described herein in a target cell may require a specific promoter, including but not limited to, a promoter that is species specific, inducible, tissue-specific, or cell cycle-specific (Parr et al., Nat. Med. 3:1145-9 (1997); the contents of which are herein incorporated by reference in their entirety).

[0117] In one embodiment, the promoter is deemed to be efficient when it drives expression of the polypeptide(s) encoded in the payload region of the viral genome of the AAV particle.

[0118] In one embodiment, the promoter is a promoter deemed to be efficient when it drives expression in the cell being targeted.

[0119] In one embodiment, the promoter is a promoter having a tropism for the cell being targeted.

[0120] In one embodiment, the promoter drives expression of the payload for a period of time in targeted tissues. Expression driven by a promoter may be for a period of 1 hour, 2, hours, 3 hours, 4 hours, 5 hours, 6 hours, 7 hours, 8 hours, 9 hours, 10 hours, 11 hours, 12 hours, 13 hours, 14 hours, 15 hours, 16 hours, 17 hours, 18 hours, 19 hours, 20 hours, 21 hours, 22 hours, 23 hours, 1 day, 2 days, 3 days, 4 days, 5 days, 6 days, 1 week, 8 days, 9 days, 10 days, 1 days, 12 days, 13 days, 2 weeks, 15 days, 16 days, 17 days, 18 days, 19 days, 20 days, 3 weeks, 22 days, 23 days, 24 days, 25 days, 26 days, 27 days, 28 days, 29 days, 30 days, 31 days, 1 month, 2 months, 3 months, 4 months, 5 months, 6 months, 7 months, 8 months, 9 months, 10 months, 11 months, 1 year, 13 months, 14 months, 15 months, 16 months, 17 months, 18 months, 19 months, 20 months, 21 months, 22 months, 23 months, 2 years, 3 years, 4 years, 5 years, 6 years, 7 years, 8 years, 9 years, 10 years or more than 10 years. Expression may be for 1-5 hours, 1-12 hours, 1-2 days, 1-5 days, 1-2 weeks, 1-3 weeks, 1-4 weeks, 1-2 months, 1-4 months, 1-6 months, 2-6 months, 3-6 months, 3-9 months, 4-8 months, 6-12 months, 1-2 years, 1-5 years, 2-5 years, 3-6 years, 3-8 years, 4-8 years or 5-10 years. As a non-limiting example, the promoter is a weak promoter for sustained expression of a payload in nervous tissues.

[0121] In one embodiment, the promoter drives expression of the polypeptides described herein for at least 1 month, 2 months, 3 months, 4 months, 5 months, 6 months, 7 months, 8 months, 9 months, 10 months, 11 months, 1 year, 2 years, 3 years 4 years, 5 years, 6 years, 7 years, 8 years, 9 years, 10 years, 11 years, 12 years, 13 years, 14 years, 15 years, 16 years, 17 years, 18 years, 19 years, 20 years, 21 years, 22 years, 23 years, 24 years, 25 years, 26 years, 27 years, 28 years, 29 years, 30 years, 31 years, 32 years, 33 years, 34 years, 35 years, 36 years, 37 years, 38 years, 39 years, 40 years, 41 years, 42 years, 43 years, 44 years, 45 years, 46 years, 47 years, 48 years, 49 years, 50 years, 55 years, 60 years, 65 years, or more than 65 years.

[0122] Promoters may be naturally occurring or non-naturally occurring. Non-limiting examples of promoters include viral promoters, plant promoters and mammalian promoters. In some embodiments, the promoters may be human promoters. In some embodiments, the promoter may be truncated or mutated.

[0123] Promoters which drive or promote expression in most tissues include, but are not limited to, human elongation factor 1α-subunit (EF1α), cytomegalovirus (CMV) immediate-early enhancer and/or promoter, chicken β-actin (CBA) and its derivative CAG, β glucuronidase (GUSB), or ubiquitin C (UBC). Tissue-specific expression elements can be used to restrict expression to certain cell types such as, but not limited to, muscle specific promoters, B cell promoters, monocyte promoters, leukocyte promoters, macrophage promoters, pancreatic acinar cell promoters, endothelial cell promoters, lung tissue promoters, astrocyte promoters, or nervous system promoters which can be used to restrict expression to neurons or subtypes of neurons, astrocytes, or oligodendrocytes.

[0124] Non-limiting examples of muscle-specific promoters include mammalian muscle creatine kinase (MCK) promoter, mammalian desmin (DES) promoter, mammalian troponin I (TNNI2) promoter, and mammalian skeletal alpha-actin (ASKA) promoter (see, e.g. U.S. Patent Application Publication No. US 20110212529, the contents of which are herein incorporated by reference in their entirety)

[0125] Non-limiting examples of tissue-specific expression elements for neurons include neuron-specific enolase (NSE), platelet-derived growth factor (PDGF), platelet-derived growth factor B-chain (PDGF-β), synapsin (Syn), methyl-CpG binding protein 2 (MeCP2), Ca²⁺/calmodulin-dependent protein kinase II (CaMKII), metabotropic glutamate receptor 2 (mGluR2), neurofilament light (NFL) or heavy (NFI), β-globin minigene nβ2 preproenkephalin (PPE), enkephalin (Enk) and excitatory amino acid transporter 2 (EAAT2) promoters. Non-limiting examples of tissue-specific expression elements for astrocytes include glial fibrillary acidic protein (GFAP) and EAAT2 promoters. A non-limiting example of a tissue-specific expression element for oligodendrocytes includes the myelin basic protein (MBP) promoter.

[0126] In one embodiment, the promoter may be less than 1 kb. The promoter may have a length of 200, 210, 220, 230, 240, 250, 260, 270, 280, 290, 300, 310, 320, 330, 340, 350, 360, 370, 380, 390, 400, 410, 420, 430, 440, 450, 460, 470, 480, 490, 500, 510, 520, 530, 540, 550, 560, 570, 580, 590, 600, 610, 620, 630, 640, 650, 660, 670, 680, 690, 700, 710, 720, 730, 740, 750, 760, 770, 780, 790, 800 or more than 800 nucleotides. The promoter may have a length between 200-300, 200-400, 200-500, 200-600, 200-700, 200-800, 300-400, 300-500, 300-600, 300-700, 300-800, 400-500, 400-600, 400-700, 400-800, 500-600, 500-700, 500-800, 600-700, 600-800 or 700-800 nucleotides.

[0127] In one embodiment, the promoter may be a combination of two or more components of the same or different starting or parental promoters such as, but not limited to, CMV and CBA. Each component may have a length of 200, 210, 220, 230, 240, 250, 260, 270, 280, 290, 300, 310, 320, 330, 340, 350, 360, 370, 380, 381, 382, 383, 384, 385, 386, 387, 388, 389, 390, 400, 410, 420, 430, 440, 450, 460, 470, 480, 490, 500, 510, 520, 530, 540, 550, 560, 570, 580, 590, 600, 610, 620, 630, 640, 650, 660, 670, 680, 690, 700, 710, 720, 730, 740, 750, 760, 770, 780, 790, 800 or more than 800 nucleotides. Each component may have a length between 200-300, 200-400, 200-500, 200-600, 200-700, 200-800, 300-400, 300-500, 300-600, 300-700, 300-800, 400-500, 400-600, 400-700, 400-800, 500-600, 500-700, 500-800, 600-700, 600-800 or 700-800 nucleotides. In one embodiment, the promoter is a combination of a 382 nucleotide CMV-enhancer sequence and a 260 nucleotide CBA-promoter sequence.

[0128] In one embodiment, the viral genome comprises a ubiquitous promoter. Non-limiting examples of ubiquitous promoters include CMV, CBA (including derivatives CAG, CBh, etc.), EF-1α, PGK, UBC, GUSB (hGBp), and UCOE (promoter of HNRPA2B1-CBX3).

[0129] Yu et al. (Molecular Pain 2011, 7:63; the contents of which are herein incorporated by reference in their entirety) evaluated the expression of eGFP under the CAG, EF1α, PGK and UBC promoters in rat DRG cells and primary DRG cells using lentiviral vectors and found that UBC showed weaker expression than the other 3 promoters and only 10-12% glial expression was seen for all promoters. Soderblom et al. (E. Neuro 2015, 2(2): ENEURO.0001-15; the contents of which are herein incorporated by reference in their entirety) evaluated the expression of eGFP in AAV8 with CMV and UBC promoters and AAV2 with the CMV promoter after injection in the motor cortex. Intranasal administration of a plasmid containing a UBC or EF1α promoter showed a sustained airway expression greater than the expression with the CMV promoter (See e.g., Gill et al., Gene Therapy 2001, Vol. 8, 1539-1546; the contents of which are herein incorporated by reference in their entirety). Husain et al. (Gene Therapy 2009, 16(7): 927-932; the contents of which are herein incorporated by reference in their entirety) evaluated an HβH construct with an hGUSB promoter, a HSV-1LAT promoter and an NSE promoter and found that the HβH construct showed weaker expression than NSE in mouse brain. Passini and Wolfe (J. Virol. 2001, 12382-12392, the contents of which are herein incorporated by reference in their entirety) evaluated the long term effects of the HβH vector following an intraventricular injection in neonatal mice and found that there was sustained expression for at least 1 year. Low expression in all brain regions was found by Xu et al. (Gene Therapy 2001, 8, 1323-1332; the contents of which are herein incorporated by reference in their entirety) when NFL and NFH promoters were used as compared to the CMV-lacZ, CMV-luc, EF, GFAP, hENK, nAChR, PPE, PPE+wpre, NSE (0.3 kb), NSE (1.8 kb) and NSE (1.8 kb+wpre). Xu et al. found that the promoter activity in descending order was NSE (1.8 kb). EF, NSE (0.3 kb), GFAP, CMV, hENK, PPE. NFL and NFH. NFL is a 650 nucleotide promoter and NFH is a 920 nucleotide promoter which are both absent in the liver but NFH is abundant in the sensory proprioceptive neurons, brain and spinal cord and NFH is present in the heart. SCN8A is a 470 nucleotide promoter which expresses throughout the DRG, spinal cord and brain with particularly high expression seen in the hippocampal neurons and cerebellar Purkinje cells, cortex, thalamus and hypothalamus (See e.g., Drews et al. Identification of evolutionary conserved, functional noncoding elements in the promoter region of the sodium channel gene SCN8A, Mamm Genome (2007) 18:723-731; and Raymond et al. Expression of Alternatively Spliced Sodium Channel α-subunit genes. Journal of Biological Chemistry (2004) 279(44) 46234-46241; the contents of each of which are herein incorporated by reference in their entirety).

[0130] Any of the promoters taught by the aforementioned Yu, Soderblom, Gill, Husain, Passini, Xu, Drews or Raymond may be used in the AAV particles or viral genomes described herein.

[0131] In one embodiment, the promoter is not cell specific.

[0132] In one embodiment, the promoter is an ubiquitin c (UBC) promoter. The UBC promoter may have a size of 300-350 nucleotides. As a non-limiting example, the UBC promoter is 332 nucleotides in length.

[0133] In one embodiment, the promoter is a 3-glucuronidase (GUSB) promoter. The GUSB promoter may have a size of 350-400 nucleotides. As a non-limiting example, the GUSB promoter is 378 nucleotides in length.

[0134] In one embodiment, the promoter is a neurofilament light (NFL) promoter. The NFL promoter may have a size of 600-700 nucleotides. As a non-limiting example, the NFL promoter is 650 nucleotides in length.

[0135] In one embodiment, the promoter is a neurofilament heavy (NFH) promoter. The NFH promoter may have a size of 900-950 nucleotides. As a non-limiting example, the NFH promoter is 920 nucleotides in length.

[0136] In one embodiment, the promoter is a SCN8A promoter. The SCN8A promoter may have a size of 450-500 nucleotides. As a non-limiting example, the SCN8A promoter is 470 nucleotides in length.

[0137] In one embodiment, the promoter is a frataxin (FXN) promoter.

[0138] In one embodiment, the promoter is a phosphoglycerate kinase 1 (PGK) promoter.

[0139] In one embodiment, the promoter is a chicken β-actin (CBA) promoter.

[0140] In one embodiment, the promoter is a cytomegalovirus (CMV) promoter.

[0141] In one embodiment, the promoter is a H1 promoter.

[0142] In one embodiment, the promoter is an engineered promoter.

[0143] In one embodiment, the promoter is a liver or a skeletal muscle promoter. Non-limiting examples of liver promoters include human α-1-antitrypsin (hAAT) and thyroxine binding globulin (TBG). Non-limiting examples of skeletal muscle promoters include Desmin, MCK or synthetic C5-12.

[0144] In one embodiment, the promoter is a RNA pol III promoter. As a non-limiting example, the RNA pol III promoter is U6. As a non-limiting example, the RNA pol III promoter is H1.

[0145] In one embodiment, the promoter is a cardiomyocyte-specific promoter. Non-limiting examples of cardiomyocyte-specific promoters include αMHC, cTnT, and CMV-MLC2k.

[0146] In one embodiment, the viral genome comprises two promoters. As a non-limiting example, the promoters are an EF1α promoter and a CMV promoter.

[0147] In one embodiment, the viral genome comprises an enhancer element, a promoter and/or a 5′UTR intron. The enhancer element, also referred to herein as an “enhancer,” may be, but is not limited to, a CMV enhancer, the promoter may be, but is not limited to, a CMV, CBA, UBC, GUSB, NSE, Synapsin, McCP2, and GFAP promoter and the 5′UTR/intron may be, but is not limited to, SV40, and CBA-MVM. As a non-limiting example, the enhancer, promoter and/or intron used in combination may be: (1) CMV enhancer, CMV promoter, SV40 5′UTR intron; (2) CMV enhancer, CBA promoter, SV 40 5′UTR intron; (3) CMV enhancer, CBA promoter, CBA-MVM 5′UTR intron; (4) UBC promoter (5) GUSB promoter; (6) NSE promoter; (7) Synapsin promoter; (8) MeCP2 promoter and (9) GFAP promoter.

[0148] In one embodiment, the viral genome comprises an engineered promoter.

[0149] In another embodiment, the viral genome comprises a promoter from a naturally expressed protein.

### Viral Genome Component: Untranslated Regions (UTRs)

[0150] By definition, wild type untranslated regions (UTRs) of a gene are transcribed but not translated. Generally, the 5′ UTR starts at the transcription start site and ends at the start codon and the 3′ UTR starts immediately following the stop codon and continues until the termination signal for transcription.

[0151] Features typically found in abundantly expressed genes of specific target organs may be engineered into UTRs to enhance the stability and protein production. As a non-limiting example, a 5′ UTR from mRNA normally expressed in the liver (e.g., albumin, serum amyloid A, Apolipoprotein A/B/E, transferrin, alpha fetoprotein, erythropoietin, or Factor VIII) may be used in the viral genomes of the AAV particles of the disclosure to enhance expression in hepatic cell lines or liver.

[0152] While not wishing to be bound by theory, wild-type 5′ untranslated regions (UTRs) include features which play roles in translation initiation. Kozak sequences, which are commonly known to be involved in the process by which the ribosome initiates translation of many genes, are usually included in 5′ UTRs. Kozak sequences have the consensus CCR(A/G)CCAUGG, where R is a purine (adenine or guanine) three bases upstream of the start codon (ATG), which is followed by another‘G’.

[0153] In one embodiment, the 5′UTR in the viral genome includes a Kozak sequence.

[0154] In one embodiment, the 5′UTR in the viral genome does not include a Kozak sequence.

[0155] While not wishing to be bound by theory, wild-type 3′ UTRs are known to have stretches of Adenosines and Uridines embedded therein. These AU rich signatures are particularly prevalent in genes with high rates of turnover. Based on their sequence features and functional properties, the AU rich elements (AREs) can be separated into three classes (Chen et al, 1995, the contents of which are herein incorporated by reference in its entirety): Class I AREs, such as, but not limited to, c-Myc and MyoD, contain several dispersed copies of an AUUUA motif within U-rich regions. Class 11 AREs, such as, but not limited to, GM-CSF and TNF-α, possess two or more overlapping UUAUUUA(U/A)(U/A) nonamers. Class III ARES, such as, but not limited to, c-Jun and Myogenin, are less well defined. These U rich regions do not contain an AUUUA motif. Most proteins binding to the AREs are known to destabilize the messenger, whereas members of the ELAV family, most notably HuR, have been documented to increase the stability of mRNA. HuR binds to AREs of all the three classes. Engineering the HuR specific binding sites into the 3′ UTR of nucleic acid molecules will lead to HuR binding and thus, stabilization of the message in vivo.

[0156] Introduction, removal or modification of 3′ UTR AU rich elements (AREs) can be used to modulate the stability of polynucleotides. When engineering specific polynucleotides, e.g., payload regions of viral genomes, one or more copies of an ARE can be introduced to make polynucleotides less stable and thereby curtail translation and decrease production of the resultant protein. Likewise, AREs can be identified and removed or mutated to increase the intracellular stability and thus increase translation and production of the resultant protein.

[0157] In one embodiment, the 3′ UTR of the viral genome may include an oligo(dT) sequence for templated addition of a poly-A tail.

[0158] In one embodiment, the viral genome may include at least one miRNA seed, binding site or full sequence, microRNAs (or miRNA or miR) are 19-25 nucleotide noncoding RNAs that bind to the sites of nucleic acid targets and down-regulate gene expression either by reducing nucleic acid molecule stability or by inhibiting translation. A microRNA sequence comprises a “seed” region, i.e., a sequence in the region of positions 2-8 of the mature microRNA, which sequence has perfect Watson-Crick complementarity to the miRNA target sequence of the nucleic acid.

[0159] In one embodiment, the viral genome may be engineered to include, alter or remove at least one miRNA binding site, full sequence or seed region.

[0160] Any UTR from any gene known in the art may be incorporated into the viral genome of the AAV particle. These UTRs, or portions thereof, may be placed in the same orientation as in the gene from which they were selected or they may be altered in orientation or location. In one embodiment, the UTR used in the viral genome of the AAV particle may be inverted, shortened, lengthened, made with one or more other 5′ UTRs or 3′ UTRs known in the art. As used herein, the term “altered” as it relates to a UTR, means that the UTR has been changed in some way in relation to a reference sequence. For example, a 3′ or 5′ UTR may be altered relative to a wild type or native UTR by the change in orientation or location as taught above or may be altered by the inclusion of additional nucleotides, deletion of nucleotides, swapping or transposition of nucleotides.

[0161] In one embodiment, the viral genome of the AAV particle comprises at least one artificial UTR which is not a variant of a wild type UTR.

[0162] In one embodiment, the viral genome of the AAV particle comprises UTRs which have been selected from a family of transcripts whose proteins share a common function, structure, feature, or property.

### Viral Genome Component: Polyadenylation Sequence

[0163] In one embodiment, the viral genome of the AAV particles of the present invention comprise at least one polyadenylation sequence. The viral genome of the AAV particle may comprise a polyadenylation sequence between the 3′ end of the payload coding sequence and the 5′ end of the 3′ITR.

[0164] In one embodiment, the polyadenylation sequence or “polyA sequence” may range from absent to about 500 nucleotides in length. The polyadenylation sequence may be, but is not limited to, 1, 2, 3, 4, 5, 6, 7, 8, 9, 10, 11, 12, 13, 14, 15, 16, 17, 18, 19, 20, 21, 22, 23, 24, 25, 26, 27, 28, 29, 30, 31, 32, 33, 34, 35, 36, 37, 38, 39, 40, 41, 42, 43, 44, 45, 46, 47, 48, 49, 50, 51, 52, 53, 54, 55, 56, 57, 58, 59, 60, 61, 62, 63, 64, 65, 66, 67, 68, 69, 70, 71, 72, 73, 74, 75, 76, 77, 78, 79, 80, 81, 82, 83, 84, 85, 86, 87, 88, 89, 90, 91, 92, 93, 94, 95, 96, 97, 98, 99, 100, 101, 102, 103, 104, 105, 106, 107, 108, 109, 110, 111, 112, 113, 114, 115, 116, 117, 118, 119, 120, 121, 122, 123, 124, 125, 126, 127, 128, 129, 130, 131, 132, 133, 134, 135, 136, 137, 138, 139, 140, 141, 142, 143, 144, 145, 146, 147, 148, 149, 150, 151, 152, 153, 154, 155, 156, 157, 158, 159, 160, 161, 162, 163, 164, 165, 166, 167, 168, 169, 170, 171, 172, 173, 174, 175, 176, 177, 178, 179, 180, 181, 182, 183, 184, 185, 186, 187, 188, 189, 190, 191, 192, 193, 194, 195, 196, 197, 198, 199, 200, 201, 202, 203, 204, 205, 206, 207, 208, 209, 210, 211, 212, 213, 214, 215, 216, 217, 218, 219, 220, 221, 222, 223, 224, 225, 226, 227, 228, 229, 230, 231, 232, 233, 234, 235, 236, 237, 238, 239, 240, 241, 242, 243, 244, 245, 246, 247, 248, 249, 250, 251, 252, 253, 254, 255, 256, 257, 258, 259, 260, 261, 262, 263, 264, 265, 266, 267, 268, 269, 270, 271, 272, 273, 274, 275, 276, 277, 278, 279, 280, 281, 282, 283, 284, 285, 286, 287, 288, 289, 290, 291, 292, 293, 294, 295, 296, 297, 298, 299, 300, 301, 302, 303, 304, 305, 306, 307, 308, 309, 310, 311, 312, 313, 314, 315, 316, 317, 318, 319, 320, 321, 322, 323, 324, 325, 326, 327, 328, 329, 330, 331, 332, 333, 334, 335, 336, 337, 338, 339, 340, 341, 342, 343, 344, 345, 346, 347, 348, 349, 350, 351, 352, 353, 354, 355, 356, 357, 358, 359, 360, 361, 362, 363, 364, 365, 366, 367, 368, 369, 370, 371, 372, 373, 374, 375, 376, 377, 378, 379, 380, 381, 382, 383, 384, 385, 386, 387, 388, 389, 390, 391, 392, 393, 394, 395, 396, 397, 398, 399, 400, 401, 402, 403, 404, 405, 406, 407, 408, 409, 410, 411, 412, 413, 414, 415, 416, 417, 418, 419, 420, 421, 422, 423, 424, 425, 426, 427, 428, 429, 430, 431, 432, 433, 434, 435, 436, 437, 438, 439, 440, 441, 442, 443, 444, 445, 446, 447, 448, 449, 450, 451, 452, 453, 454, 455, 456, 457, 458, 459, 460, 461, 462, 463, 464, 465, 466, 467, 468, 469, 470, 471, 472, 473, 474, 475, 476, 477, 478, 479, 480, 481, 482, 483, 484, 485, 486, 487, 488, 489, 490, 491, 492, 493, 494, 495, 496, 497, 498, 499, and 500 nucleotides in length.

[0165] In one embodiment, the polyadenylation sequence is 50-100 nucleotides in length.

[0166] In one embodiment, the polyadenylation sequence is 50-150 nucleotides in length.

[0167] In one embodiment, the polyadenylation sequence is 50-160 nucleotides in length.

[0168] In one embodiment, the polyadenylation sequence is 50-200 nucleotides in length.

[0169] In one embodiment, the polyadenylation sequence is 60-100 nucleotides in length.

[0170] In one embodiment, the polyadenylation sequence is 60-150 nucleotides in length.

[0171] In one embodiment, the polyadenylation sequence is 60-160 nucleotides in length.

[0172] In one embodiment, the polyadenylation sequence is 60-200 nucleotides in length.

[0173] In one embodiment, the polyadenylation sequence is 70-100 nucleotides in length.

[0174] In one embodiment, the polyadenylation sequence is 70-150 nucleotides in length.

[0175] In one embodiment, the polyadenylation sequence is 70-160 nucleotides in length.

[0176] In one embodiment, the polyadenylation sequence is 70-200 nucleotides in length.

[0177] In one embodiment, the polyadenylation sequence is 80-100 nucleotides in length.

[0178] In one embodiment, the polyadenylation sequence is 80-150 nucleotides in length.

[0179] In one embodiment, the polyadenylation sequence is 80-160 nucleotides in length.

[0180] In one embodiment, the polyadenylation sequence is 80-200 nucleotides in length.

[0181] In one embodiment, the polyadenylation sequence is 90-100 nucleotides in length.

[0182] In one embodiment, the polyadenylation sequence is 90-150 nucleotides in length.

[0183] In one embodiment, the polyadenylation sequence is 90-160 nucleotides in length.

[0184] In one embodiment, the polyadenylation sequence is 90-200 nucleotides in length.

### Viral Genome Component: Introns

[0185] In one embodiment, the viral genome of the AAV particles of the present disclosure comprises at least one element to enhance the transgene target specificity and expression (See e.g., Powell et al. Viral Expression Cassette Elements to Enhance Transgene Target Specificity and Expression in Gene Therapy, Discov. Med, 2015, 19(102): 49-57; the contents of which are herein incorporated by reference in their entirety) such as an intron. Non-limiting examples of introns include, MVM (67-97 bps), FIX truncated intron 1 (300 bps), β-globin SD/immunoglobulin heavy chain splice acceptor (250 bps), adenovirus splice donor/immunoglobin splice acceptor (500 bps), SV40 late splice donor/splice acceptor (19S/16S) (180 bps) and hybrid adenovirus splice donor/IgG splice acceptor (230 bps).

[0186] In one embodiment, the intron or intron portion may be 50-500 nucleotides in length. The intron may have a length of 60, 70, 80, 90, 100, 110, 120, 130, 140, 150, 160, 170, 171, 172, 173, 174, 175, 176, 177, 178, 179, 180, 190, 200, 210, 220, 230, 240, 250, 260, 270, 280, 290, 300, 310, 320, 330, 340, 350, 360, 370, 380, 390, 400, 410, 420, 430. 440, 450, 460, 470, 480, 490 or 500 nucleotides. The intron may have a length between 80-100, 80-120, 80-140, 80-160, 80-180, 80-200, 80-250, 80-300, 80-350, 80-400, 80-450, 80-500, 100-300, 100-400, 100-500, 200-300, 200-400, 200-500, 300-400, 300-500, or 400-500 nucleotides.

### Viral Genome Component: Stuffer Sequences

[0187] In one embodiment, the viral genome of the AAV particles of the present disclosure comprises at least one element to improve packaging efficiency and expression, such as a stuffer or filler sequence. Non-limiting examples of stuffer sequences include albumin and/or alpha-1 antitrypsin. Any known viral, mammalian, or plant sequence may be manipulated for use as a stuffer sequence.

[0188] In one embodiment, the stuffer or filler sequence may be from about 100-3500 nucleotides in length. The stuffer sequence may have a length of about 100, 200, 300, 400, 500, 600, 700, 800, 900, 1000, 1100, 1200, 1300, 1400, 1500, 1600, 1700, 1800, 1900, 2000, 2100, 2200, 2300, 2400, 2500, 2600, 2700, 2800, 2900 or 3000 nucleotides.

Viral Genome Component: miRNA

[0189] In one embodiment, the viral genome comprises at least one sequence encoding a miRNA to reduce the expression of the transgene in a specific tissue, miRNAs and their targeted tissues are well known in the art. As a non-limiting example, a miR-122 miRNA may be encoded in the viral genome to reduce the expression of the viral genome in the liver.

### AAV Production

[0190] The present disclosure provides methods for the generation of parvoviral particles. e.g. AAV particles, by viral genome replication in a viral replication cell.

[0191] In accordance with the disclosure, the viral genome comprising a payload region will be incorporated into the AAV particle produced in the viral replication cell. Methods of making AAV particles are well known in the art and are described in e.g., U.S. Pat. Nos. 6,204,059, 5,756,283, 6,258,595, 6,261,551. U.S. Pat. Nos. 6,270,996, 6,281,010, 6,365,394, 6,475,769, 6,482,634, 6,485,966, 6,943,019, 6,953,690, 7,022,519, 7,238,526, 7,291,498 and 7,491,508, 5,064,764, 6,194,191, 6,566,118, 8,137,948; or International Publication Nos. WO1996039530, WO1998010088, WO1999014354, WO1999015685, WO1999047691, WO2000055342, WO2000075353 and WO2001023597; Methods In Molecular Biology, ed. Richard, Humana Press, N J (1995); O'Reilly et al., Baculovirus Expression Vectors, A Laboratory Manual, Oxford Univ. Press (1994); Samulski et al. J. Vir. 63:3822-8 (1989); Kajigaya et al., Proc. Nat'l. Acad. Sci. USA 88: 4646-50 (1991); Ruffing et al., J. Vir. 66:6922-30 (1992); Kimbauer et al., Vir., 219:37-44 (1996); Zhao et al., Vir. 272:382-93 (2000); the contents of each of which are herein incorporated by reference in their entirety. In one embodiment, the AAV particles are made using the methods described in WO2015191508, the contents of which are herein incorporated by reference in their entirety.

[0192] Viral replication cells commonly used for production of recombinant AAV viral vectors include but are not limited to HEK293 cells, COS cells, HeLa cells, KB cells, and other mammalian cell lines as described in U.S. Pat. Nos. 6,156,303, 5,387,484, 5,741,683, 5,691,176, and 5,688,676; U.S. Patent Application Publication No. 2002/0081721, and International Patent Publication Nos. WO 2000047757, WO 2000024916, and WO 1996017947, the contents of each of which are herein incorporated by reference in their entirety.

[0193] In some embodiments, the present disclosure provides a method for producing an AAV particle having enhanced (increased, improved) transduction efficiency comprising the steps of: 1) co-transfecting competent bacterial cells with a bacmid vector and either a viral construct vector and/or AAV payload construct vector, 2) isolating the resultant viral construct expression vector and AAV payload construct expression vector and separately transfecting viral replication cells, 3) isolating and purifying resultant payload and viral construct particles comprising viral construct expression vector or AAV payload construct expression vector, 4) co-infecting a viral replication cell with both the AAV payload and viral construct particles comprising viral construct expression vector or AAV payload construct expression vector, and 5) harvesting and purifying the AAV particle comprising a viral genome.

[0194] In some embodiments, the present disclosure provides a method for producing an AAV particle comprising the steps of 1) simultaneously co-transfecting mammalian cells, such as, but not limited to HEK293 cells, with a payload region, a construct expressing rep and cap genes and a helper construct, 2) harvesting and purifying the AAV particle comprising a viral genome.

[0195] In some embodiments, the viral genome of the AAV particle of the disclosure optionally encodes a selectable marker. The selectable marker may comprise a cell-surface marker, such as any protein expressed on the surface of the cell including, but not limited to receptors, CD markers, lectins, integrins, or truncated versions thereof.

[0196] In some embodiments, selectable marker reporter genes may include the marker genes described in International Publication Nos. WO1996023810, and WO1996030540; Heim et al., Current Biology 2:178-182 (1996), Heim et al., Proc. Natl. Acad. Sci. USA (1994), 91(26):12501-12504; and Heim et al., Science 373:663-664 (1995): the contents of each of which are incorporated herein by reference in their entirety.

### Genome Size

[0197] In one embodiment, the AAV particle which comprises a payload described herein may be single stranded or double stranded viral genome. The size of the viral genome may be small, medium, large or the maximum size. Additionally, the viral genome may comprise a promoter and a polyA tail.

[0198] In one embodiment, the viral genome which comprises a payload described herein may be a small single stranded viral genome. A small single stranded viral genome may be 2.1 to 3.5 kb in size such as about 2.1, 2.2, 2.3, 2.4, 2.5, 2.6, 2.7, 2.8, 2.9, 3.0, 3.1, 3.2, 3.3, 3.4, and 3.5 kb in size. As a non-limiting example, the small single stranded viral genome may be 3.2 kb in size. As another non-limiting example, the small single stranded viral genome may be 2.2 kb in size. Additionally, the viral genome may comprise a promoter and a polyA tail.

[0199] In one embodiment, the viral genome which comprises a payload described herein may be a small double stranded viral genome. A small double stranded viral genome may be 1.3 to 1.7 kb in size such as about 1.3, 1.4, 1.5, 1.6, and 1.7 kb in size. As a non-limiting example, the small double stranded viral genome may be 1.6 kb in size. Additionally, the viral genome may comprise a promoter and a polyA tail.

[0200] In one embodiment, the viral genome which comprises a payload described herein e.g., polynucleotide, siRNA or dsRNA, may be a medium single stranded viral genome. A medium single stranded viral genome may be 3.6 to 4.3 kb in size such as about 3.6, 3.7, 3.8, 3.9, 4.0, 4.1, 4.2 and 4.3 kb in size. As a non-limiting example, the medium single stranded viral genome may be 4.0 kb in size. Additionally, the viral genome may comprise a promoter and a polyA tail.

[0201] In one embodiment, the viral genome which comprises a payload described herein may be a medium double stranded viral genome. A medium double stranded viral genome may be 1.8 to 2.1 kb in size such as about 1.8, 1.9, 2.0, and 2.1 kb in size. As a non-limiting example, the medium double stranded viral genome may be 2.0 kb in size. Additionally, the viral genome may comprise a promoter and a polyA tail.

[0202] In one embodiment, the vector genome which comprises a payload described herein may be a large single stranded viral genome. A large single stranded viral genome may be 4.4 to 6.0 kb in size such as about 4.4, 4.5, 4.6, 4.7, 4.8, 4.9, 5.0, 5.1, 5.2, 5.3, 5.4, 5.5, 5.6, 5.7, 5.8, 5.9 and 6.0 kb in size. As a non-limiting example, the large single stranded viral genome may be 4.7 kb in size. As another non-limiting example, the large single stranded viral genome may be 4.8 kb in size. As yet another non-limiting example, the large single stranded viral genome may be 6.0 kb in size. Additionally, the viral genome may comprise a promoter and a polyA tail.

[0203] In one embodiment, the viral genome which comprises a payload described herein may be a large double stranded viral genome. A large double stranded viral genome may be 2.2 to 3.0 kb in size such as about 2.2, 2.3, 2.4, 2.5, 2.6, 2.7, 2.8, 2.9 and 3.0 kb in size. As a non-limiting example, the large double stranded viral genome may be 2.4 kb in size. Additionally, the viral genome may comprise a promoter and a polyA tail.

### Payloads

[0204] The AAV particles of the present disclosure comprise at least one payload region. As used herein. “payload” or “payload region” refers to one or more polynucleotides or polynucleotide regions encoded by or within a viral genome or an expression product of such polynucleotide or polynucleotide region, e.g., a transgene, a polynucleotide encoding a polypeptide or multi-polypeptide or a modulatory nucleic acid or regulatory nucleic acid. Payloads of the present disclosure typically encode polypeptides or fragments or variants thereof.

[0205] The payload region may be constructed in such a way as to reflect a region similar to or mirroring the natural organization of an mRNA.

[0206] The payload region may comprise a combination of coding and non-coding nucleic acid sequences.

[0207] In some embodiments, the AAV payload region may encode a coding or non-coding RNA.

[0208] In one embodiment, the AAV particle comprises a viral genome with a payload region comprising nucleic acid sequences encoding more than one polypeptide of interest. In such an embodiment, a viral genome encoding more than one polypeptide may be replicated and packaged into a viral particle. A target cell transduced with a viral particle comprising more than one polypeptide may express each of the polypeptides in a single cell.

[0209] In one embodiment, the payload region may comprise the components as shown in FIG. 1. The payload region 110 is located within the viral genome 100. At the 5′ and/or the 3′ end of the payload region 110 there may be at least one inverted terminal repeat (ITR) 120. In one embodiment, within the payload region, there is a promoter region 130, an intron region 140 and a coding region 150.

[0210] Where the AAV particle payload region encodes a polypeptide, the polypeptide may be a peptide or protein. As a non-limiting example, the payload region may encode at least one allele of apolipoprotein E (APOE) such as, but not limited to ApoE2, ApoE3 and/or ApoE4. As a second non-limiting example, the payload region may encode a human or a primate frataxin protein, or fragment or variant thereof. As another non-limiting example, the payload region may encode an antibody, or a fragment thereof. The AAV viral genomes encoding polypeptides described herein may be useful in the fields of human disease, viruses, infections veterinary applications and a variety of in vivo and in vitro settings.

[0211] In some embodiments, the AAV particles are useful in the field of medicine for the treatment, prophylaxis, palliation or amelioration of neurological diseases and/or disorders.

[0212] In some embodiments, the AAV particles are useful in the field of medicine for the treatment, prophylaxis, palliation or amelioration of tauopathy.

[0213] In some embodiments, the AAV particles are useful in the field of medicine for the treatment, prophylaxis, palliation or amelioration of Alzheimer's Disease.

[0214] In some embodiments, the AAV particles are useful in the field of medicine for the treatment, prophylaxis, palliation or amelioration of Friedreich's ataxia, or any disease stemming from a loss or partial loss of frataxin protein.

[0215] In some embodiments, the AAV particles are useful in the field of medicine for the treatment, prophylaxis, palliation or amelioration of Parkinson's Disease.

[0216] In some embodiments, the AAV particles are useful in the field of medicine for the treatment, prophylaxis, palliation or amelioration of Amyotrophic lateral sclerosis.

[0217] In some embodiments, the AAV particles are useful in the field of medicine for the treatment, prophylaxis, palliation or amelioration of Huntington's Disease.

### The Nature of the Polypeptides and Variants

[0218] Amino acid sequences encoded by payload regions of the viral genomes described herein may be translated as a whole polypeptide, a plurality of polypeptides or fragments of polypeptides, which independently may be encoded by one or more nucleic acids, fragments of nucleic acids or variants of any of the aforementioned. As used herein, “polypeptide” means a polymer of amino acid residues (natural or unnatural) linked together most often by peptide bonds. The term, as used herein, refers to proteins, polypeptides, and peptides of any size, structure, or function. In some instances, the polypeptide encoded is smaller than about 50 amino acids and the polypeptide is then termed a peptide. If the polypeptide is a peptide, it will be at least about 2, 3, 4, or at least 5 amino acid residues long. Thus, polypeptides include gene products, naturally occurring polypeptides, synthetic polypeptides, homologs, orthologs, paralogs, fragments and other equivalents, variants, and analogs of the foregoing. A polypeptide may be a single molecule or may be a multi-molecular complex such as a dimer, trimer or tetramer. They may also comprise single chain or multichain polypeptides and may be associated or linked. The term polypeptide may also apply to amino acid polymers in which one or more amino acid residues are an artificial chemical analogue of a corresponding naturally occurring amino acid.

[0219] The term “polypeptide variant” refers to molecules which differ in their amino acid sequence from a native or reference sequence. The amino acid sequence variants may possess substitutions, deletions, and/or insertions at certain positions within the amino acid sequence, as compared to a native or reference sequence. Ordinarily, variants will possess at least about 50% identity (homology) to a native or reference sequence, and preferably, they will be at least about 80%, more preferably at least about 90% identical (homologous) to a native or reference sequence.

[0220] In some embodiments “variant mimics” are provided. As used herein, the term “variant mimic” is one which contains one or more amino acids which would mimic an activated sequence. For example, glutamate may serve as a mimic for phosphoro-threonine and/or phosphoro-serine. Alternatively, variant mimics may result in deactivation or in an inactivated product containing the mimic, e.g., phenylalanine may act as an inactivating substitution for tyrosine; or alanine may act as an inactivating substitution for serine.

[0221] The term “amino acid sequence variant” refers to molecules with some differences in their amino acid sequences as compared to a native or starting sequence. The amino acid sequence variants may possess substitutions, deletions, and/or insertions at certain positions within the amino acid sequence. “Native” or “starting” sequence should not be confused with a wild type sequence. As used herein, a native or starting sequence is a relative term referring to an original molecule against which a comparison may be made. “Native” or “starting” sequences or molecules may represent the wild-type (that sequence found in nature) but do not have to be the wild-type sequence.

[0222] Ordinarily, variants will possess at least about 70% homology to a native sequence, and preferably, they will be at least about 80%, more preferably at least about 90% homologous to a native sequence. “Homology” as it applies to amino acid sequences is defined as the percentage of residues in the candidate amino acid sequence that are identical with the residues in the amino acid sequence of a second sequence after aligning the sequences and introducing gaps, if necessary, to achieve the maximum percent homology. Methods and computer programs for the alignment are well known in the art. It is understood that homology depends on a calculation of percent identity but may differ in value due to gaps and penalties introduced in the calculation.

[0223] By “homologs” as it applies to amino acid sequences is meant the corresponding sequence of other species having substantial identity to a second sequence of a second species.

[0224] “Analogs” is meant to include polypeptide variants which differ by one or more amino acid alterations, e.g., substitutions, additions or deletions of amino acid residues that still maintain the properties of the parent polypeptide.

[0225] Sequence tags or amino acids, such as one or more lysines, can be added to the peptide sequences described herein (e.g., at the N-terminal or C-terminal ends). Sequence tags can be used for peptide purification or localization. Lysines can be used to increase peptide solubility or to allow for biotinylation. Alternatively, amino acid residues located at the carboxy and amino terminal regions of the amino acid sequence of a peptide or protein may optionally be deleted providing for truncated sequences. Certain amino acids (e.g., C-terminal or N-terminal residues) may alternatively be deleted depending on the use of the sequence, as for example, expression of the sequence as part of a larger sequence which is soluble, or linked to a solid support.

[0226] “Substitutional variants” when referring to proteins are those that have at least one amino acid residue in a native or starting sequence removed and a different amino acid inserted in its place at the same position. The substitutions may be single, where only one amino acid in the molecule has been substituted, or they may be multiple, where two or more amino acids have been substituted in the same molecule.

[0227] As used herein the term “conservative amino acid substitution” refers to the substitution of an amino acid that is normally present in the sequence with a different amino acid of similar size, charge, or polarity. Examples of conservative substitutions include the substitution of a non-polar (hydrophobic) residue such as isoleucine, valine and leucine for another non-polar residue. Likewise, examples of conservative substitutions include the substitution of one polar (hydrophilic) residue for another such as between arginine and lysine, between glutamine and asparagine, and between glycine and serine. Additionally, the substitution of a basic residue such as lysine, arginine or histidine for another, or the substitution of one acidic residue such as aspartic acid or glutamic acid for another acidic residue are additional examples of conservative substitutions. Examples of non-conservative substitutions include the substitution of a non-polar (hydrophobic) amino acid residue such as isoleucine, valine, leucine, alanine, methionine for a polar (hydrophilic) residue such as cysteine, glutamine, glutamic acid or lysine and/or a polar residue for a non-polar residue.

[0228] “Insertional variants” when referring to proteins are those with one or more amino acids inserted immediately adjacent to an amino acid at a particular position in a native or starting sequence. “Immediately adjacent” to an amino acid means connected to either the alpha-carboxy or alpha-amino functional group of the amino acid.

[0229] “Deletional variants” when referring to proteins, are those with one or more amino acids in the native or starting amino acid sequence removed. Ordinarily, deletional variants will have one or more amino acids deleted in a particular region of the molecule.

[0230] As used herein, the term “derivative” is used synonymously with the term “variant” and refers to a molecule that has been modified or changed in any way relative to a reference molecule or starting molecule. In some embodiments, derivatives include native or starting proteins that have been modified with an organic proteinaceous or non-proteinaceous derivatizing agent, and post-translational modifications. Covalent modifications are traditionally introduced by reacting targeted amino acid residues of the protein with an organic derivatizing agent that is capable of reacting with selected side-chains or terminal residues, or by harnessing mechanisms of post-translational modifications that function in selected recombinant host cells. The resultant covalent derivatives are useful in programs directed at identifying residues important for biological activity, for immunoassays, or for the preparation of anti-protein antibodies for immunoaffinity purification of the recombinant glycoprotein. Such modifications are within the ordinary skill in the art and are performed without undue experimentation.

[0231] Certain post-translational modifications are the result of the action of recombinant host cells on the expressed polypeptide. Glutaminyl and asparaginyl residues are frequently post-translationally deamidated to the corresponding glutamyl and aspartyl residues. Alternatively, these residues are deamidated under mildly acidic conditions. Either form of these residues may be present in the proteins used in accordance with the present disclosure.

[0232] Other post-translational modifications include hydroxylation of proline and lysine, phosphorylation of hydroxyl groups of seryl or threonyl residues, methylation of the alpha-amino groups of lysine, arginine, and histidine side chains (T. E. Creighton, Proteins: Structure and Molecular Properties, W.H. Freeman & Co., San Francisco, pp. 79-86 (1983)).

[0233] “Features” when referring to proteins are defined as distinct amino acid sequence-based components of a molecule. Features of the proteins of the present disclosure include surface manifestations, local conformational shape, folds, loops, half-loops, domains, half-domains, sites, termini or any combination thereof.

[0234] As used herein when referring to proteins the term “surface manifestation” refers to a polypeptide based component of a protein appearing on an outermost surface.

[0235] As used herein when referring to proteins the term “local conformational shape” means a polypeptide based structural manifestation of a protein which is located within a definable space of the protein.

[0236] As used herein when referring to proteins the term “fold” means the resultant conformation of an amino acid sequence upon energy minimization. A fold may occur at the secondary or tertiary level of the folding process. Examples of secondary level folds include beta sheets and alpha helices. Examples of tertiary folds include domains and regions formed due to aggregation or separation of energetic forces. Regions formed in this way include hydrophobic and hydrophilic pockets, and the like.

[0237] As used herein the term “turn” as it relates to protein conformation means a bend which alters the direction of the backbone of a peptide or polypeptide and may involve one, two, three or more amino acid residues.

[0238] As used herein when referring to proteins the term “loop” refers to a structural feature of a peptide or polypeptide which reverses the direction of the backbone of a peptide or polypeptide and comprises four or more amino acid residues. Oliva et al. have identified at least 5 classes of protein loops (J. Mol Biol 266 (4): 814-830; 1997).

[0239] As used herein when referring to proteins the term “half-loop” refers to a portion of an identified loop having at least half the number of amino acid residues as the loop from which it is derived. It is understood that loops may not always contain an even number of amino acid residues. Therefore, in those cases where a loop contains or is identified to comprise an odd number of amino acids, a half-loop of the odd-numbered loop will comprise the whole number portion or next whole number portion of the loop (number of amino acids of the loop/2+/−0.5 amino acids). For example, a loop identified as a 7 amino acid loop could produce half-loops of 3 amino acids or 4 amino acids (7/2=3.5+/−0.5 being 3 or 4).

[0240] As used herein when referring to proteins the term “domain” refers to a motif of a polypeptide having one or more identifiable structural or functional characteristics or properties (e.g., binding capacity, serving as a site for protein-protein interactions).

[0241] As used herein when referring to proteins the term “half-domain” means portion of an identified domain having at least half the number of amino acid residues as the domain from which it is derived. It is understood that domains may not always contain an even number of amino acid residues. Therefore, in those cases where a domain contains or is identified to comprise an odd number of amino acids, a half-domain of the odd-numbered domain will comprise the whole number portion or next whole number portion of the domain (number of amino acids of the domain/2+/−0.5 amino acids). For example, a domain identified as a 7 amino acid domain could produce half-domains of 3 amino acids or 4 amino acids (7/2=3.5+/−0.5 being 3 or 4). It is also understood that sub-domains may be identified within domains or half-domains, these subdomains possessing less than all of the structural or functional properties identified in the domains or half domains from which they were derived. It is also understood that the amino acids that comprise any of the domain types herein need not be contiguous along the backbone of the polypeptide (i.e., nonadjacent amino acids may fold structurally to produce a domain, half-domain or subdomain).

[0242] As used herein when referring to proteins the terms “site” as it pertains to amino acid based embodiments is used synonymous with “amino acid residue” and “amino acid side chain”. A site represents a position within a peptide or polypeptide that may be modified, manipulated, altered, derivatized or varied within the polypeptide based molecules of the present disclosure.

[0243] As used herein the terms “termini or terminus” when referring to proteins refers to an extremity of a peptide or polypeptide. Such extremity is not limited only to the first or final site of the peptide or polypeptide but may include additional amino acids in the terminal regions. The polypeptide based molecules of the present disclosure may be characterized as having both an N-terminus (terminated by an amino acid with a free amino group (NH2)) and a C-terminus (terminated by an amino acid with a free carboxyl group (COOH)). Proteins described herein are in some cases made up of multiple polypeptide chains brought together by disulfide bonds or by non-covalent forces (multimers, oligomers). These sorts of proteins will have multiple N- and C-termini. Alternatively, the termini of the polypeptides may be modified such that they begin or end, as the case may be, with a non-polypeptide based moiety such as an organic conjugate.

[0244] Once any of the features have been identified or defined as a component of a molecule of the disclosure, any of several manipulations and/or modifications of these features may be performed by moving, swapping, inverting, deleting, randomizing or duplicating. Furthermore, it is understood that manipulation of features may result in the same outcome as a modification to the molecules described herein. For example, a manipulation which involves deleting a domain would result in the alteration of the length of a molecule just as modification of a nucleic acid to encode less than a full length molecule would.

[0245] Modifications and manipulations can be accomplished by methods known in the art such as site directed mutagenesis. The resulting modified molecules may then be tested for activity using in vitro or in vivo assays such as those described herein or any other suitable screening assay known in the art.

### Payloads: Nucleic Acids Encoding a Protein of Interest

[0246] In one embodiment, the payload region of the AAV particle comprises one or more nucleic acid sequences encoding a protein of interest.

### Apolipoprotein E (APOE)

[0247] In one embodiment, the payload region of the AAV particle comprises one or more nucleic acid sequences encoding an allele of the apolipoprotein E (APOE) gene (e.g., ApoE2, ApoE3, and/or ApoE4).

[0248] In one embodiment, the payload region of the AAV particle comprises a nucleic acid sequence encoding an amino acid signal peptide with the sequence MKVLWAALLVTFLAGCQA (SEQ ID NO: 1722).

[0249] In one embodiment, the payload region of the AAV particle comprises a nucleic acid sequence encoding an amino acid signal peptide with the sequence MSSGASRKSWDPGNPWPPDWPITGRKMKVLWAALLVTFLAGCQA (SEQ ID NO: 1723).

[0250] In one embodiment, the payload region of the AAV particle comprises a nucleic acid sequence encoding an amino acid sequence, or fragment thereof, or variant thereof, described in Table 2.

[0251] In one embodiment, the payload region of the AAV particle comprises a nucleic acid sequence, or fragment thereof, or variant thereof, described in Table 2.

TABLE 2
Apolipoprotein E Sequences

| Identification | Reference | SEQ ID NO |
|---|---|---|
| APOE SEQ-001 | ENSP00000252486; NP_000032.1; | 1724 |
| | NP_001289618.1; NP_01289619.1; | |
| | NP_001289620.1 | |
| APOE SEQ-002 | ENSP00000252486; NP_000032.1; | 1725 |
| | NP_001289618.1; NP_001289619.1; | |
| | NP_001289620.1; Mature peptide | |
| APOE SEQ-003 | ENSP00000413135 | 1726 |
| APOE SEQ-004 | ENSP00000413135; Mature peptide | 1727 |
| APOE SEQ-005 | ENSP00000413653 | 1728 |
| APOE SEQ-006 | ENSP00000413653; Mature peptide | 1729 |
| APOE SEQ-007 | ENSP00000410423 | 1730 |
| APOE SEQ-008 | ENSP00000410423; Mature peptide | 1731 |
| APOE SEQ-009 | NP_001289617.1 | 1732 |
| APOE SEQ-010 | NP_001289617.1; Mature peptide | 1733 |
| APOE SEQ-011 | ENST00000252486.8 | 1734 |
| APOE SEQ-012 | CCDS12647.1 for ENST00000252486.8 | 1735 |
| APOE SEQ-013 | ENST00000446996.5 | 1736 |
| APOE SEQ-014 | ENST00000485628.2 | 1737 |
| APOE SEQ-015 | ENST00000434152.5 | 1738 |
| APOE SEQ-016 | ENST00000425718.1 | 1739 |
| APOE SEQ-017 | NM_000041.3 | 1740 |
| APOE SEQ-018 | NM_001302689.1 | 1741 |
| APOE SEQ-019 | NM_001302690.1 | 1742 |
| APOE SEQ-020 | NM_001302691.1 | 1743 |
| APOE SEQ-021 | NM_001302688.1 | 1744 |

[0252] In one embodiment, the payload region of the AAV particle comprises one or more nucleic acid sequences encoding one or more variants of SEQ ID NO: 1724. The variant may include, but is not limited to, one or more of the variants: E21K (the amino acid E (Glu) at position 21 in SEQ ID NO: 1724 is changed to K (Lys)), E31K (the amino acid E (Glu) at position 31 in SEQ ID NO: 1724 is changed to K (Lys)), R43C (the amino acid R (Arg) at position 43 in SEQ ID NO: 1724 is changed to C (Cys)), L46P (the amino acid L (Leu) at position 46 in SEQ ID NO: 1724 is changed to P (Pro)), T60A (the amino acid T (Thr) at position 60 in SEQ ID NO: 1724 is changed to A (Ala)), Q64H (the amino acid Q (Gin) at position 64 in SEQ ID NO: 1724 is changed to H (His)), Q99K (the amino acid Q (Gln) at position 99 in SEQ ID NO: 1724 is changed to K (Lys)), P102R (the amino acid P (Pro) at position 102 in SEQ ID NO: 1724 is changed to R (Arg)), A117T (the amino acid A (Ala) at position 117 in SEQ ID NO: 1724 is changed to T (Thr)), A124V (the amino acid A (Ala) at position 124 in SEQ ID NO: 1724 is changed to V (Val)), C130R (the amino acid C (Cys) at position 130 in SEQ ID NO: 1724 is changed to R (Arg)), G145D (the amino acid G (Gly) at position 145 in SEQ ID NO: 1724 is changed to D (Asp)), G145GEVQAMLG (the amino acid G (Gly) at position 145 in SEQ ID NO: 1724 is changed to be GEVQAMLG (Gly-Glu-Val-Gln-Ala-Met-Leu-Gly)). R152Q (the amino acid R (Arg) at position 152 in SEQ ID NO: 1724 is changed to Q (Gin)), R154C (the amino acid R (Arg) at position 154 in SEQ ID NO: 1724 is changed to C (Cys)), R154S (the amino acid R (Arg) at position 154 in SEQ ID NO: 1724 is changed to S (Ser)), R160C (the amino acid R (Arg) at position 160 in SEQ ID NO: 1724 is changed to C (Cys)), R163H (the amino acid R (Arg) at position 163 in SEQ ID NO: 1724 is changed to H (His)), R163P (the amino acid R (Arg) at position 163 in SEQ ID NO: 1724 is changed to P (Pro)), K164E (the amino acid K (Lys) at position 164 in SEQ ID NO: 1724 is changed to E (Glu)), K164Q (the amino acid K (Lys) at position 164 in SEQ ID NO: 1724 is changed to Q (Gln)), A170P (the amino acid A (Ala) at position 170 in SEQ ID NO: 1724 is changed to P (Pro)), R176C (the amino acid R (Arg) at position 176 in SEQ ID NO: 1724 is changed to C (Cys)), R242Q (the amino acid R (Arg) at position 242 in SEQ ID NO: 1724 is changed to Q (Gln)), R246C (the amino acid R (Arg) at position 246 in SEQ ID NO: 1724 is changed to C (Cys)), V254E (the amino acid V (Val) at position 254 in SEQ ID NO: 1724 is changed to E (Glu)), EE262-263KK (the amino acids EE (Glu-Glu) at positions 262-263 in SEQ ID NO: 1724 are changed to KK (Lys-Lys)), R269G (the amino acid R (Arg) at position 269 in SEQ ID NO: 1724 is changed to G (Gly)), L270E (the amino acid L (Leu) at position 270 in SEQ ID NO: 1724 is changed to E (Glu)), R292H (the amino acid R (Arg) at position 292 in SEQ ID NO: 1724 is changed to H (His)), S314R (the amino acid S (Ser) at position 314 in SEQ ID NO: 1724 is changed to R (Arg)), the removal of amino acid 167, or a combination thereof. As a non-limiting example, the payload region of the AAV particle comprises one or more nucleic acid sequences encoding an amino acid sequence where the amino acid C (Cys) at position 130 in SEQ ID NO: 1724 is changed to R (Arg). As a non-limiting example, the payload region of the AAV particle comprises one or more nucleic acid sequences encoding an amino acid sequence where the amino acid R (Arg) at position 176 in SEQ ID NO: 1724 is changed to C (Cys). As a non-limiting example, the payload region of the AAV particle comprises one or more nucleic acid sequences encoding an amino acid sequence where the amino acid C (Cys) at position 130 in SEQ ID NO: 1724 is changed to R and the amino acid R (Arg) at position 176 in SEQ ID NO: 1724 is changed to C (Cys).

[0253] In some embodiments, the payload region of the AAV particle comprises one or more nucleic acid sequences encoding an ApoE molecule comprising a signal peptide sequence as given in SEQ ID NO: 1722 or 1723. As a non-limiting example, the signal peptide may be cleaved during cellular processing to yield a mature peptide as given in SEQ ID NOs: 1725, 1727, 1729, 1731, and 1733. Alternatively, the payload region of the AAV particle comprises one or more nucleic acid sequences encoding an ApoE molecule that lacks a signal peptide sequences, as given in SEQ ID NOs: 1725, 1727, 1729, 1731, and 1733.

[0254] In one embodiment, the payload region of the AAV particle comprises one or more nucleic acid sequences encoding one or more variants of SEQ ID NO: 1725. The variant may include, but is not limited to, one or more of the variants: C112R (the amino acid C (Cys) at position 112 in SEQ ID NO: 1725 is changed to R (Arg)), or R158C (the amino acid R (Arg) at position 158 in SEQ ID NO: 1725 is changed to C (Cys).

[0255] In one embodiment, the payload region of the AAV particle comprises one or more nucleic acid sequences that encode ApoE2 (cys112, cys158).

[0256] In one embodiment, the payload region of the AAV particle comprises one or more nucleic acid sequences that encode ApoE3 (cys112, arg158).

[0257] In one embodiment, the payload region of the AAV particle comprises one or more nucleic acid sequences that encode ApoE4 (arg112, arg158).

### Frataxin (XWN)

[0258] In one embodiment, the payload region of the AAV particle comprises one or more nucleic acid sequences encoding frataxin (FXN) such as a human frataxin and a primate frataxin.

[0259] In one embodiment, the payload region of the AAV particle comprises a nucleic acid sequence encoding an amino acid sequence, or fragment thereof, or variant thereof, described in Table 3.

[0260] In one embodiment, the payload region of the AAV particle comprises a nucleic acid sequence, or fragment thereof, or variant thereof, described in Table 3.

TABLE 3
Frataxin Sequences

| Identification | Reference | SEQ ID NO |
|---|---|---|
| FXN SEQ-001 | NP_000135.2 | 1745 |
| FXN SEQ-002 | NP_852090.1 | 1746 |
| FXN SEQ-003 | NP_01155178.1 | 1747 |
| FXN SEQ-004 | NM_000144.4 | 1748 |
| FXN SEQ-005 | NM_181425.2 | 1749 |
| FXN SEQ-006 | NM_001161706.1 | 1750 |

### Aromatic L-Amino Acid Decarboxylase (AADC)

[0261] In one embodiment, the payload region of the AAV particle comprises one or more nucleic acid sequences encoding Aromatic L-Amino Acid Decarboxylase (AADC).

[0262] In one embodiment, the payload region of the AAV particle comprises a nucleic acid sequence encoding an amino acid sequence, or fragment thereof, or variant thereof, described in Table 4.

[0263] In one embodiment, the payload region of the AAV particle comprises a nucleic acid sequence, or fragment thereof, or variant thereof, described in Table 4.

TABLE 4
Aromatic L-Amino Acid Decarboxylase Sequences

| Identification | Reference | SEQ ID NO |
|---|---|---|
| AADC SEQ-001 | NP_000781.1 | 1751 |
| AADC SEQ-002 | NM_000790.3 | 1752 |

### ATPase Sarcoplasmic Endoplasmic Reticulum Ca2+ Transporting 2 (ATP2A2)

[0264] In one embodiment, the payload region of the AAV particle comprises one or more nucleic acid sequences encoding ATPase Sarcoplasmic/Endoplasmic Reticulum Ca2+ Transporting 2 (ATP2A2).

[0265] In one embodiment, the payload region of the AAV particle comprises a nucleic acid sequence encoding an amino acid sequence, or fragment thereof, or variant thereof, described in Table 5.

[0266] In one embodiment, the payload region of the AAV particle comprises a nucleic acid sequence, or fragment thereof, or variant thereof, described in Table 5.

TABLE 5
ATPase Sarcoplasmic/Endoplasmic
Reticulum Ca2+ Transporting 2

| Identification | Reference | SEQ ID NO |
|---|---|---|
| ATP2A2 SEQ-001 | NP_001672.1 | 1803 |
| ATP2A2 SEQ-002 | NP_733765.1 | 1804 |
| ATP2A2 SEQ-003 | NM_003681.3 | 1805 |
| ATP2A2 SEQ-004 | NM_170665.3 | 1806 |

### S100 Calcium Binding Protein A1 (S100A1)

[0267] In one embodiment, the payload region of the AAV particle comprises one or more nucleic acid sequences encoding S100 Calcium Binding Protein A1 (S100A1).

[0268] In one embodiment, the payload region of the AAV particle comprises a nucleic acid sequence encoding an amino acid sequence, or fragment thereof, or variant thereof, described in Table 6.

[0269] In one embodiment, the payload region of the AAV particle comprises a nucleic acid sequence, or fragment thereof, or variant thereof, described in Table 6.

TABLE 6
S100 Calcium Binding Protein A1

| Identification | Reference | SEQ ID NO |
|---|---|---|
| S100A1 SEQ-001 | NP_006262.1 | 1807 |
| S100A1 SEQ-002 | NM_006271.1 | 1808 |

### Anti Tau Paired Helical Filaments (Tau-PHF) Antibodies

[0270] In one embodiment, the payload region of the AAV particle comprises one or more nucleic acid sequences encoding the heavy chain and/or light chain of an antibody specific to Paired Helical Filaments (PHF) formed by abnormally folded Tau proteins (Tau-PHFs). The payload region may also comprise one or more nucleic acid sequences encoding a linker region between the nucleic acid sequences encoding the heavy and light chain. As a non-limiting example, the linker region comprises a furin cleavage recognition sequence (nucleic acid sequence shown as SEQ ID NO: 1811) and/or a 2A cis-acting hydrolase element (nucleic acid sequence shown as SEQ ID NO: 1812). As a non-limiting example, the nucleic acid sequence of the linker region is SEQ ID NO: 1813. As a non-limiting example, the antibody that specifically binds to Tau paired helical filaments is PHF-1. The PHF-1 antibody may comprise heavy chains and light chains as taught in this disclosure.

[0271] In one embodiment, the payload region of the AAV particle comprises a nucleic acid sequence encoding an amino acid sequence, or fragment thereof, or variant thereof, described in Table 7.

[0272] In one embodiment, the payload region of the AAV particle comprises a nucleic acid sequence, or fragment thereof, or variant thereof, described in Table 7.

TABLE 7
Anti Tau PHF antibodies

| Identification | Reference | SEQ ID NO |
|---|---|---|
| PHF-1 SEQ-001 | Heavy Chain | 1814 |
| PHF-1 SEQ-002 | Light Chain | 1815 |

[0273] In one embodiment, the payload region of the AAV particle comprises a nucleic acid sequence SEQ ID NO: 1816 which comprises (5′ to 3′) the kozak (SEQ ID NO: 1817), heavy chain (SEQ ID NO: 1814), linker region (which includes the furin cleavage recognition sequence (SEQ ID NO: 1811) and the 2A cis-acting hydrolase element sequence (SEQ ID NO: 1812)), light chain sequence (SEQ ID NO: 1812) of PHF-1, and the stop codon TAG described in FIG. 5A of WO2015035190, the contents of which are herein incorporated by reference in their entirety.

[0274] In one embodiment, the payload region of the AAV particle comprises a nucleic acid sequence SEQ ID NO: 1818, which comprises (5′ to 3′) the kozak (SEQ ID NO: 1817), light chain (SEQ ID NO: 1815), linker region (which includes the furin cleavage recognition sequence (SEQ ID NO: 1811) and the 2A cis-acting hydrolase element sequence (SEQ ID NO: 1812)), heavy chain (SEQ ID NO: 1814) of PHF-1, and the stop codon TAG.

[0275] In one embodiment, the payload region of the AAV particle comprises a nucleic acid encoding the heavy chain and/or light chain of PHF-1 as taught in FIG. 5A of WO2015035190, the contents of which are herein incorporated by reference, wherein the heavy chain and/or light chain of PHF-1 in WO2015035190 has been altered (e.g., modified and/or mutated). The sequence may be mutated or modified to changed state or structure of a molecule. As a non-limiting example, the sequence may include an addition of an amino acid, an amino acid substitution, and/or a deletion of an amino acid.

[0276] In one embodiment, the payload region of the AAV particle comprises a nucleic acid encoding the light chain of PHF-1 where the light chain sequence has been altered to remove the second methionine at the beginning of the light chain amino acid sequence. As a non-limiting example, the payload region of the AAV particle comprises a nucleic acid encoding an amino acid sequence encoding a light chain of PHF-1 as shown in Table 8.

TABLE 8
Anti Tau PHF antibodies

| Identification | Reference | SEQ ID NO |
|---|---|---|
| PHF-1 SEQ-003 | Light Chain | 1819 |

[0277] In one embodiment, the payload region of the AAV particle comprises a nucleic acid sequence SEQ ID NO: 1820, which comprises (5′ to 3′) the kozak (SEQ ID NO: 1817), heavy chain (SEQ ID NO: 1814), linker region (which includes the furin cleavage recognition sequence (SEQ ID NO: 1811) and the 2A cis-acting hydrolase element sequence (SEQ ID NO: 1812)), light chain sequence (SEQ ID NO: 1819) with one codon of “ATG” at the 5′ end of the light chain sequence of PHF-1, and the stop codon TAG.

[0278] In one embodiment, the payload region of the AAV particle comprises a nucleic acid sequence SEQ ID NO: 1821, which comprises (5′ to 3′) the kozak (SEQ ID NO: 1817), light chain sequence with one codon of “ATG” at the 5′ end of the light chain sequence (SEQ ID NO: 1819), linker region (which includes the furin cleavage recognition sequence (SEQ ID NO: 1811) and the 2A cis-acting hydrolase element sequence (SEQ ID NO: 1812)), heavy chain of PHF-1 (SEQ ID NO: 1814), and the stop codon TAG.

### Payloads: Modulatory Polynucleotides as Payloads

[0279] In some embodiments, the payload region of the AAV particle comprises one or more modulatory polynucleotides, e.g., RNA or DNA molecules as therapeutic agents. Exemplary modulatory polynucleotides may be miRNAs, dsRNA and siRNA duplexes. RNA interference mediated gene silencing can specifically inhibit targeted gene expression. The present disclosure then provides small double stranded RNA (dsRNA) molecules (small interfering RNA, siRNA) targeting a gene of interest, pharmaceutical compositions comprising such siRNAs, as well as processes of their design. The present disclosure also provides methods of their use for inhibiting gene expression and protein production of gene of interest, for treating a neurological disease.

[0280] The present disclosure provides small interfering RNA (siRNA) duplexes (and modulatory polynucleotides encoding them) that target the mRNA of a gene of interest to interfere with the gene expression and/or protein production.

[0281] In one embodiment, the siRNA duplexes of the present disclosure may target the gene of interest along any segment of their respective nucleotide sequence.

[0282] In one embodiment, the siRNA duplexes of the present disclosure may target the gene of interest at the location of a single nucleotide polymorphism (SNP) or variant within the nucleotide sequence.

[0283] In some embodiments, a nucleic acid sequence encoding such siRNA molecules, or a single strand of the siRNA molecules, is inserted into the viral genome of the AAV particle and introduced into cells, specifically cells in the central nervous system.

[0284] AAV particles have been investigated for siRNA delivery because of several unique features. Non-limiting examples of the features include (i) the ability to infect both dividing and non-dividing cells; (ii) a broad host range for infectivity, including human cells; (iii) wild-type AAV has not been associated with any disease and has not been shown to replicate in infected cells; (iv) the lack of cell-mediated immune response against the vector and (v) the non-integrative nature in a host chromosome thereby reducing potential for long-term expression. Moreover, infection with AAV particles has minimal influence on changing the pattern of cellular gene expression (Stilwell and Samulski et al., Biotechniques, 2003, 34, 148-150; the contents of which are incorporated herein by reference in their entirety).

[0285] The encoded siRNA duplex of the present disclosure contains an antisense strand and a sense strand hybridized together forming a duplex structure, wherein the antisense strand is complementary to the nucleic acid sequence of the targeted gene, and wherein the sense strand is homologous to the nucleic acid sequence of the targeted gene. In some aspects, the 5′end of the antisense strand has a 5′ phosphate group and the 3′end of the sense strand contains a 3′hydroxyl group. In other aspects, there are none, one or 2 nucleotide overhangs at the 3′end of each strand.

[0286] According to the present disclosure, each strand of the siRNA duplex targeting a gene of interest is about 19 to 25, 19 to 24 or 19 to 21 nucleotides in length, preferably about 19 nucleotides, 20 nucleotides, 21 nucleotides, 22 nucleotides, 23 nucleotides, 24 nucleotides, or 25 nucleotides in length. In some aspects, the siRNAs may be unmodified RNA molecules.

[0287] In other aspects, the siRNAs may contain at least one modified nucleotide, such as base, sugar or backbone modification.

[0288] In one embodiment, an siRNA or dsRNA includes at least two sequences that are complementary to each other. The dsRNA includes a sense strand having a first sequence and an antisense strand having a second sequence. The antisense strand includes a nucleotide sequence that is substantially complementary to at least part of an mRNA encoding the target gene, and the region of complementarity is 30 nucleotides or less, and at least 15 nucleotides in length. Generally, the dsRNA is 19 to 25, 19 to 24 or 19 to 21 nucleotides in length. In some embodiments, the dsRNA is from about 15 to about 25 nucleotides in length, and in other embodiments the dsRNA is from about 25 to about 30 nucleotides in length. In some embodiments, the dsRNA is about 15 nucleotides in length, 16 nucleotides in length, 17 nucleotides in length, 18 nucleotides in length, 19 nucleotides, 20 nucleotides, 21 nucleotides, 22 nucleotides, 23 nucleotides, 24 nucleotides, 25 nucleotides in length, 26 nucleotides in length, 27 nucleotides in length, 28 nucleotides in length, 29 nucleotides in length, or 30 nucleotides in length.

[0289] The dsRNA, whether directly administered or encoded in an expression vector, i.e. the AAV particle, upon contacting with a cell expressing the target protein, inhibits the expression of the protein by at least 10%, at least 15%, at least 20%, at least 25%, at least 30%, at least 35% or at least 40% or more, such as when assayed by a method as described herein.

[0290] According to the present disclosure, the siRNA duplexes or dsRNA molecules are designed and tested for their ability in reducing expression of the target gene (e.g., mRNA levels of the target gene) in cultured cells. siRNA design tools are available in the art. Any commercial software may be used to design the siRNA duplexes against a gene of interest.

[0291] According to the present disclosure. AAV particles comprising a payload region having the nucleic acids of the siRNA duplexes, one strand of the siRNA duplex or the dsRNA targeting a gene of interest are produced, the AAV particle serotypes may be or may include a capsid and/or a peptide insert such as, but not limited to VOY101, VOY201, VOY801, VOY1101, AAVPHP.B (PHP.B), AAVPHP.A (PHP.A), AAVG2B-26, AAVG2B-13, AAVTH1.1-32, AAVTH1.1-35, AAVPHP.B2 (PHP.B2), AAVPHP.B3 (PHP.B3), AAVPHP.N/PHP.B-DGT, AAVPHP.B-EST, AAVPHP.B-GGT, AAVPHP.B-ATP, AAVPHP.B-ATT-T, AAVPHP.B-DGT-T, AAVPHP.B-GGT-T, AAVPHP.B-SGS, AAVPHP.B-AQP, AAVPHP.B-QQP, AAVPHP.B-SNP(3), AAVPHP.B-SNP, AAVPHP.B-QGT, AAVPHP.B-NQT, AAVPHP.B-EGS, AAVPHP.B-SGN, AAVPHP.B-EGT, AAVPHP.B-DST, AAVPHP.B-DST, AAVPHP.B-STP, AAVPHP.B-PQP, AAVPHP.B-SQP, AAVPHP.B-QLP, AAVPHP.B-TMP, AAVPHP.B-TTP, AAVPHP.S/G2A12, AAVG2A15/G2A3 (G2A3), AAVG2B4 (G2B4), AAVG2B5 (G2B5), PHP.S, AAV1, AAV2, AAV2G9, AAV3, AAV3a, AAV3b, AAV3-3, AAV4, AAV4-4, AAV5, AAV6, AAV6.1, AAV6.2, AAV6.1.2, AAV7, AAV7.2, AAV8, AAV9, AAV9.11, AAV9.13, AAV9.16, AAV9.24, AAV9.45, AAV9.47, AAV9.61, AAV9.68, AAV9.84, AAV9.9, AAV10, AAV11, AAV12, AAV16.3, AAV24.1, AAV27.3, AAV42.12, AAV42-1b, AAV42-2, AAV42-3a, AAV42-3b, AAV42-4, AAV42-5a, AAV42-5b, AAV42-6b, AAV42-8, AAV42-10, AAV42-11, AAV42-12, AAV42-13, AAV42-15, AAV42-aa, AAV43-1, AAV43-12, AAV43-20, AAV43-21, AAV43-23, AAV43-25, AAV43-5, AAV44.1. AAV44.2, AAV44.5, AAV223.1, AAV223.2, AAV223.4, AAV223.5, AAV223.6. AAV223.7, AAV1-7/rh.48, AAV1-8/rh.49, AAV2-15/rh.62, AAV2-3/rh.61, AAV2-4/rh.50, AAV2-5/rh.51, AAV3.1/hu.6, AAV3.1/hu.9, AAV3-9/rh.52, AAV3-11/rh.53, AAV4-8/r11.64, AAV4-9/rh.54, AAV4-19/rh.55, AAV5-3/rh.57, AAV5-22/rh.58, AAV7.3/hu.7, AAV16.8/hu.10, AAV16.12/hu.11, AAV29.3/bb.1, AAV29.5/bb.2, AAV106.1/hu.37, AAV114.3/hu.40, AAV127.2/hu.41, AAV127.5/hu.42, AAV128.3/hu.44, AAV30.4/hu.48, AAV145.1/hu.53, AAV145.5/hu.54, AAV145.6/hu.55, AAV161.10/hu.60, AAV161.6/hu.61, AAV33.12/hu.17, AAV33.4/hu.15, AAV33.8/hu.16, AAV52/hu.19, AAV52.1/hu.20, AAV58.2/hu.25, AAVA3.3, AAVA3.4, AAVA3.5, AAVA3.7, AAVC1, AAVC2, AAVC5, AAV-DJ, AAV-DJ8, AAVF3, AAVF5, AAVH2, AAVrh.72, AAVhu.8, AAVrh.68, AAVrh.70, AAVpi.1. AAVpi.3, AAVpi.2, AAVrh.60, AAVrh.44, AAVrh.65, AAVrh.55, AAVrh.47, AAVrh.69, AAVrh.45, AAVrh.59, AAVhu.12, AAVH6, AAVLK03, AAVH-1/hu.1, AAVH-5/hu.3, AAVLG-10/rh.40, AAVLG-4/rh.38, AAVLG-9/hu.39, AAVN721-8/rh.43, AAVCh.5, AAVCh.5R1, AAVcy.2, AAVcy.3, AAVcy.4, AAVcy.5, AAVCy.5R1, AAVCy.5R2, AAVCy.5R3, AAVCy.5R4, AAVcy.6, AAVhu.1, AAVhu.2, AAVhu.3, AAVhu.4, AAVhu.5, AAVhu.6, AAVhu.7, AAVhu.9, AAVhu.10, AAVhu.11, AAVhu.13, AAVhu.15, AAVhu.16, AAVhu.17. AAVhu.18, AAVhu.20, AAVhu.21, AAVhu.22, AAVhu.23.2, AAVhu.24, AAVhu.25, AAVhu.27, AAVhu.28, AAVhu.29, AAVhu.29R, AAVhu.31, AAVhu.32, AAVhu.34, AAVhu.35. AAVhu.37, AAVhu.39, AAVhu.40, AAVhu.41, AAVhu.42, AAVhu.43, AAVhu.44, AAVhu.44R1, AAVhu.44R2, AAVhu.44R3, AAVhu.45, AAVhu.46, AAVhu.47, AAVhu.48, AAVhu.48R1, AAVhu.48R2, AAVhu.48R3, AAVhu.49, AAVhu.51. AAVhu.52, AAVhu.54, AAVhu.55, AAVhu.56, AAVhu.57, AAVhu.58, AAVhu.60, AAVhu.61, AAVhu.63, AAVhu.64, AAVhu.66, AAVhu.67, AAVhu.14/9, AAVhu.t 19, AAVrh.2, AAVrh.2R. AAVrh.8, AAVrh.8R. AAVrh.10. AAVrh.12, AAVrh.13, AAVrh.13R, AAVrh.14, AAVrh.17, AAVrh.18, AAVrh.19, AAVrh.20. AAVrh.21, AAVrh.22, AAVrh.23, AAVrh.24, AAVrh.25, AAVrh.31. AAVrh.32, AAVrh.33, AAVrh.34, AAVrh.35, AAVrh.36, AAVrh.37, AAVrh.37R2, AAVrh.38, AAVrh.39, AAVrh.40, AAVrh46, AAVrh.48, AAVrh.48.1, AAVrh.48.1.2, AAVrh.48.2, AAVrh.49, AAVrh.51. AAVrh.52, AAVrh.53, AAVrh.54, AAVrh.56, AAVrh.57, AAVrh.58, AAVrh.61, AAVrh.64. AAVrh.64R1, AAVrh.64R2, AAVrh.67, AAVrh.73, AAVrh.74, AAVrh8R, AAVrh8R A586R mutant, AAVrh8R R533A mutant, AAAV, BAAV, caprine AAV, bovine AAV, AAVhE1.1, AAVhEr1.5, AAVhER1.14, AAVhEr1.8, AAVhEr1.16, AAVhEr1.18, AAVhEr1.35, AAVhEr1.7, AAVhEr1.36, AAVhEr2.29, AAVhEr2.4, AAVhEr2.16, AAVhEr2.30, AAVhEr2.31, AAVhEr2.36, AAVhER1.23, AAVhEr3.1, AAV2.5T, AAV-PAEC, AAV-LK01, AAV-LK02, AAV-LK03, AAV-LK04, AAV-LK05, AAV-LK06, AAV-LK07 AAV-LK08, AAV-LK09, AAV-LK10, AAV-LK11, AAV-LK12, AAV-LK13, AAV-LK14, AAV-LK15, AAV-LK16, AAV-LK17, AAV-LK18, AAV-LK19, AAV-PAEC2, AAV-PAEC4, AAV-PAEC6, AAV-PAEC7, AAV-PAEC8, AAV-PAEC11, AAV-PAEC12, AAV-2-pre-miRNA-101, AAV-8h, AAV-8b, AAV-h, AAV-b, AAV SM 10-2, AAV Shuffle 100-1, AAV Shuffle 100-3, AAV Shuffle 100-7, AAV Shuffle 10-2, AAV Shuffle 10-6, AAV Shuffle 10-8, AAV Shuffle 100-2, AAV SM 10-1, AAV SM 10-8, AAV SM 100-3, AAV SM 100-10, BNP61 AAV, BNP62 AAV, BNP63 AAV, AAVrh.50, AAVrh.43, AAVrh.62, AAVrh.48, AAVhu.19, AAVhu.11, AAVhu.53, AAV4-8/rh.64, AAVLG-9/hu.39, AAV54.5/hu.23, AAV54.2/hu.22, AAV54.7/hu.24, AAV54.1/hu.21, AAV54.4R/hu.27, AAV46.2/hu.28, AAV46.6/hu.29, AAV128.1/hu.43, true type AAV (tAAV), UPENN AAV 10, Japanese AAV10 serotypes, AAV CBr-7.1, AAV CBr-7.10, AAV CBr-7.2, AAV CBr-7.3, AAV CBr-7.4, AAV CBr-7.5, AAV CBr-7.7, AAV CBr-7.8, AAV CBr-B7.3, AAV CBr-B7.4, AAV CBr-E1, AAV CBr-E2, AAV CBr-E3, AAV CBr-E4, AAV CBr-E5, AAV CBr-e5, AAV CBr-E6, AAV CBr-E7, AAV CBr-E8, AAV CHt-1 AAV CHt-2, AAV CHt-3, AAV CHt-6.1, AAV CHt-6.10, AAV CHt-6.5, AAV CHt-6.6, AAV CHt-6.7, AAV CHt-6.8, AAV CHt-P1, AAV CHt-P2, AAV CHt-P5, AAV CHt-P6, AAV CHt-P8, AAV CHt-P9, AAV CKd-1, AAV CKd-10, AAV CKd-2, AAV CKd-3, AAV CKd-4, AAV CKd-6, AAV CKd-7, AAV CKd-8, AAV CKd-B1, AAV CKd-B2, AAV CKd-B3, AAV CKd-B4, AAV CKd-B5, AAV CKd-B6, AAV CKd-B7, AAV CKd-B8, AAV CKd-H1, AAV CKd-H2, AAV CKd-H3, AAV CKd-H4, AAV CKd-H5, AAV CKd-H6, AAV CKd-N3, AAV CKd-N4, AAV CKd-N9, AAV CLg-F1, AAV CLg-F2, AAV CLg-F3, AAV CLg-F4, AAV CLg-F5, AAV CLg-F6, AAV CLg-F7, AAV CLg-F8, AAV CLv-1, AAV CLv1-1, AAV Clv1-10, AAV CLv1-2, AAV CLv-12, AAV CLv1-3, AAV CLv-13, AAV CLv1-4, AAV Clv1-7, AAV Clv1-8, AAV Clv1-9, AAV CLv-2, AAV CLv-3, AAV CLv-4, AAV CLv-6, AAV CLv-8, AAV CLv-D1 AAV CLv-D2, AAV CLv-D3, AAV CLv-D4, AAV CLv-D5, AAV CLv-D6, AAV CLv-D7, AAV CLv-D8, AAV CLv-E1, AAV CLv-K1, AAV CLv-K3, AAV CLv-K6, AAV CLv-L4, AAV CLv-L5, AAV CLv-L6, AAV CLv-M1, AAV CLv-M11, AAV CLv-M2, AAV CLv-M5, AAV CLv-M6, AAV CLv-M7, AAV CLv-M8, AAV CLv-M9, AAV CLv-R1, AAV CLv-R2, AAV CLv-R3, AAV CLv-R4, AAV CLv-R5, AAV CLv-R6, AAV CLv-R7, AAV CLv-R8, AAV CLv-R9, AAV CSp-1, AAV CSp-10, AAV CSp-11, AAV CSp-2, AAV CSp-3, AAV CSp-4, AAV CSp-6, AAV CSp-7, AAV CSp-8, AAV CSp-8.10, AAV CSp-8.2, AAV CSp-8.4, AAV CSp-8.5, AAV CSp-8.6, AAV CSp-8.7, AAV CSp-8.8, AAV CSp-8.9, AAV CSp-9, AAV.hu.48R3, AAV.VR-355, AAV3B, AAV4. AAV5, AAVF1/HSC1, AAVF11/HSC11, AAVF12/HSC12, AAVF13/HSC13, AAVF14/HSC14, AAVF5/HSC15, AAVF16/HSC16, AAVF17/HSC17, AAVF2/HSC2, AAVF3/HSC3, AAVF4/HSC4, AAVF5/HSC5, AAVF6/HSC6, AAVF7/HSC7. AAVF8/HSC8, and/or AAVF9/HSC9 and variants thereof. In one embodiment, the AAV particle contains a payload comprising a nucleic acid sequence encoding an siRNA duplex, one strand of the siRNA duplex, or dsRNA and may comprise the serotype of VOY101. In one embodiment, the AAV particle contains a payload comprising a nucleic acid sequence encoding a siRNA duplex, one strand of the siRNA duplex, or dsRNA and may comprise the serotype of VOY201. In one embodiment, the AAV contains a payload comprising a nucleic acid sequence encoding a siRNA duplex, one strand of the siRNA duplex, or dsRNA and may comprise the serotype of VOY801. In one embodiment, the AAV particle contains a payload comprising a nucleic acid sequence encoding a siRNA duplex, one strand of the siRNA duplex, or dsRNA and may comprise the serotype of VOY1101.

[0292] In one embodiment, the siRNA duplexes or encoded dsRNA molecules may be used to reduce the expression of target protein by at least about 30%, 40%, 50%, 60%, 70%, 80%, 85%, 90%, 95% and 100%, or at least 20-30%, 20-40%, 20-50%, 20-60%, 20-70%, 20-80%, 20-90%, 20-95%, 20-100%, 3040%, 30-50%, 30-60%, 30-70%, 30-80%, 30-90%, 30-95%, 30-100%, 40-50%, 40-60/o, 40-70%, 40-80%, 40-90%, 40-95%, 40-100%, 50-60%, 50-70%, 50-80%, 50-90%, 50-95%, 50-100%, 60-70%, 60-80%, 60-90%, 60-95%, 60-100%, 70-80%, 70-90%, 70-95%, 70-100%, 80-90%, 80-95%, 80-100%, 90-95%, 90-100% or 95-100%. As a non-limiting example, the expression of target protein expression may be reduced 50-90%.

[0293] In one embodiment, the siRNA duplexes or encoded dsRNA molecules may be used to reduce the expression of target mRNA by at least about 30%, 40%, 50%, 60%, 70%, 80%, 85%, 90%, 95% and 100%, or at least 20-30%, 20-40%, 20-50%, 20-60%, 20-70%, 20-80%, 20-90%, 20-95%, 20-100%, 3040%, 30-50%, 30-60%, 30-70%, 30-80%, 30-90%, 30-95%, 30-100%, 40-50%, 40-60%, 40-70%, 40-80%, 40-90%, 40-95%, 40-100%, 50-60%, 50-70%, 50-80%, 50-90%, 50-95%, 50-100%, 60-70%, 60-80%, 60-90%, 60-95%, 60-100%, 70-80%, 70-90%, 70-95%, 70-100%, 80-90%, 80-95%, 80-100%, 90-95%, 90-100% or 95-100%. As a non-limiting example, the expression of target mRNA expression may be reduced 50-90%.

[0294] In one embodiment, the siRNA duplexes or encoded dsRNA molecules may be used to decrease the level of target mRNA by at least about 30%, 40%, 50%, 60%, 70%, 80%, 85%, 90%, 95% and 100%, or at least 20-30%, 20-40%, 20-50%, 20-60%, 20-70%, 20-80%, 20-90%, 20-95%, 20-100%, 30-40%, 30-50%, 30-60%, 30-70%, 30-80%, 30-90%, 30-95%, 30-100%, 40-50%, 40-60%, 40-70%, 40-80%, 40-90%, 40-95%, 40-100%, 50-60%, 50-70%, 50-80%, 50-90%, 50-95%, 50-100%, 60-70%, 60-80%, 60-90%, 60-95%, 60-100%, 70-80%, 70-90%, 70-95%, 70-100%, 80-90%, 80-95%, 80-100%, 90-95%, 90-100% or 95-100%. As a non-limiting example, the expression of target mRNA expression may be reduced 50-90%.

[0295] In one embodiment, the siRNA duplexes or encoded dsRNA molecules may be used to reduce the expression of target protein and/or mRNA in at least one region of the CNS. The expression of target protein and/or mRNA is reduced by at least about 30%, 40%, 50%, 60%, 70%, 80%, 85%, 90%, 95% and 100%, or at least 20-30%, 20-40%, 20-50%, 20-60%, 20-70%, 20-80%, 20-90%, 20-95%, 20-100%, 30-40%, 30-50%, 30-60%, 30-70%, 30-80%, 30-90%, 30-95%, 30-100%, 40-50%, 40-60%, 40-70%, 40-80%, 40-90%, 40-95%, 40-100%, 50-60%, 50-70%, 50-80%, 50-90%, 50-95%, 50-100%, 60-70%, 60-80%, 60-90%, 60-95%, 60-100%, 70-80%, 70-90%, 70-95%, 70-100%, 80-90%, 80-95%, 80-100%, 90-95%, 90-100% or 95-100% in at least one region of the CNS.

[0296] As a non-limiting example, the expression of target protein and/or mRNA is reduced in the cerebellum of the brain by 50%-90%. As a non-limiting example, the expression of target protein and/or mRNA is reduced in the cerebrum of the brain by 50%-90%. As a non-limiting example, the expression of target protein and/or mRNA is reduced in the brainstem of the brain by 50%-90%. As a non-limiting example, the expression of target protein and mRNA in the neurons (e.g., cortical neurons) is reduced by 50-90%. As a non-limiting example, the expression of target protein and mRNA in the neurons (e.g., cortical neurons) is reduced by 40-50%.

[0297] In some embodiments, the payload comprising the nucleic acid sequence of at least one siRNA duplex targeting a gene of interest may be packaged into an AAV particle that can transduce the blood-brain barrier upon delivery of the AAV particle. The AAV particle serotype may be or include a capsid and/or a peptide insert such as but not limited to VOY101, VOY201, VOY801, VOY1101, AAVPHP.B (PHP.B), AAVPHP.A (PHP.A), AAVG2B-26, AAVG2B-13, AAVTH1.1-32. AAVTH1.1-35, AAVPHP.B2 (PHP.B2), AAVPHP.B3 (PHP.B3), AAVPHP.N/PHP.B-DGT, AAVPHP.B-EST, AAVPHP.B-GGT, AAVPHP.B-ATP, AAVPHP.B-ATT-T, AAVPHP.B-DGT-T, AAVPHP.B-GGT-T, AAVPHP.B-SGS, AAVPHP.B-AQP, AAVPHP.B-QQP, AAVPHP.B-SNP(3), AAVPHP.B-SNP, AAVPHP.B-QGT, AAVPHP.B-NQT, AAVPHP.B-EGS, AAVPHP.B-SGN, AAVPHP.B-EGT, AAVPHP.B-DST, AAVPHP.B-DST, AAVPHP.B-STP, AAVPHP.B-PQP, AAVPHP.B-SQP, AAVPHP.B-QLP, AAVPHP.B-TMP, AAVPHP.B-TTP, AAVPHP.S/G2A12, AAVG2A15/G2A3 (G2A3), AAVG2B4 (G2B4), AAVG2B5, PHP.S, AAV1, AAV2, AAV2G9, AAV3, AAV3a, AAV3b, AAV3-3, AAV4, AAV4-4, AAV5, AAV6, AAV6.1, AAV6.2, AAV6.1.2, AAV7, AAV7.2, AAV8, AAV9, AAV9.11, AAV9.13, AAV9.16, AAV9.24, AAV9.45, AAV9.47, AAV9.61, AAV9.68, AAV9.84, AAV9.9, AAV10, AAV11, AAV12, AAV16.3, AAV24.1, AAV27.3, AAV42.12, AAV42-1b, AAV42-2, AAV42-3a, AAV42-3b, AAV42-4, AAV42-5a, AAV42-5b. AAV42-6b, AAV42-8, AAV42-10, AAV42-11, AAV42-12, AAV42-13, AAV42-15, AAV42-aa, AAV43-1, AAV43-12, AAV43-20, AAV43-21, AAV43-23, AAV43-25, AAV43-5, AAV44.1, AAV44.2, AAV44.5, AAV223.1, AAV223.2, AAV223.4, AAV223.5, AAV223.6, AAV223.7, AAV1-7/rh.48, AAV1-8/rh.49, AAV2-15/rh.62, AAV2-3/rh.61, AAV2-4/rh.50, AAV2-5/rh.51, AAV3.1/hu.6, AAV3.1/hu.9, AAV3-9/rh.52, AAV3-11/rh.53, AAV4-8/r11.64, AAV4-9/rh.54, AAV4-19/rh.55, AAV5-3/rh.57, AAV5-22/rh.58, AAV7.3/hu.7, AAV16.8/hu.10, AAV16.12/hu.11, AAV29.3/bb.1, AAV29.5/bb.2, AAV106.1/hu.37, AAV114.3/hu.40, AAV127.2/hu.41, AAV127.5/hu.42, AAV128.3/hu.44, AAV130.4/hu.48, AAV145.1/hu.53, AAV145.5/hu.54, AAV145.6/hu.55, AAV161.10/hu.60, AAV161.6/hu.61, AAV33.12/hu.17, AAV33.4/hu.15, AAV33.8/hu.16, AAV52/hu.19, AAV52.1/hu.20, AAV58.2/hu.25, AAVA3.3, AAVA3.4, AAVA3.5, AAVA3.7, AAVC1, AAVC2, AAVC5. AAV-DJ, AAV-DJ8, AAVF3, AAVF5, AAVH2, AAVrh.72, AAVhu.8, AAVrh.68, AAVrh.70, AAVpi.1, AAVpi.3, AAVpi.2, AAVrh.60, AAVrh.44, AAVrh.65, AAVrh.55, AAVrh.47, AAVrh.69, AAVrh.45, AAVrh.59, AAVhu.12. AAVH6, AAVLK03, AAVH-1/hu.1, AAVH-5/hu.3, AAVLG-10/rh.40, AAVLG-4/rh.38, AAVLG-9/hu.39, AAVN721-8/rh.43, AAVCh.5, AAVCh.5R1, AAVcy.2, AAVcy.3, AAVcy.4, AAVcy.5, AAVCy.5R1, AAVCy.5R2, AAVCy.5R3, AAVCy.5R4, AAVcy.6, AAVhu.1, AAVhu.2, AAVhu.3, AAVhu.4, AAVhu.5, AAVhu.6, AAVhu.7, AAVhu.9, AAVhu.10. AAVhu.11. AAVhu.13. AAVhu.15, AAVhu.16, AAVhu.17. AAVhu.18, AAVhu.20, AAVhu.21, AAVhu.22, AAVhu.23.2, AAVhu.24, AAVhu.25, AAVhu.27, AAVhu.28, AAVhu.29, AAVhu.29R. AAVhu.31, AAVhu.32, AAVhu.34, AAVhu.35, AAVhu.37, AAVhu.39, AAVhu.40, AAVhu.41, AAVhu.42, AAVhu.43, AAVhu.44, AAVhu.44R1, AAVhu.44R2. AAVhu.44R3, AAVhu.45, AAVhu.46, AAVhu.47, AAVhu.48, AAVhu.48R1, AAVhu.48R2, AAVhu.48R3, AAVhu.49, AAVhu.51, AAVhu.52, AAVhu.54, AAVhu.55, AAVhu.56, AAVhu.57, AAVhu.58, AAVhu.60, AAVhu.61, AAVhu.63, AAVhu.64, AAVhu.66, AAVhu.67, AAVhu.14/9, AAVhu.t 19, AAVrh.2, AAVrh.2R, AAVrh.8, AAVrh.8R, AAVrh.10, AAVrh.12, AAVrh.13, AAVrh.13R, AAVrh.14, AAVrh.17, AAVrh.18, AAVrh.19, AAVrh.20, AAVrh.21, AAVrh.22, AAVrh.23, AAVrh.24, AAVrh.25, AAVrh.31. AAVrh.32, AAVrh.33, AAVrh.34, AAVrh.35, AAVrh.36, AAVrh.37, AAVrh.37R2, AAVrh.38, AAVrh.39, AAVrh.40, AAVrh.46, AAVrh.48, AAVrh.48.1, AAVrh.48.1.2, AAVrh.48.2, AAVrh.49, AAVrh.51, AAVrh.52, AAVrh.53, AAVrh.54, AAVrh.56, AAVrh.57, AAVrh.58, AAVrh.61, AAVrh.64, AAVrh.64R1, AAVrh.64R2, AAVrh.67, AAVrh.73, AAVrh.74, AAVrh8R, AAVrh8R A586R mutant. AAVrh8R R533A mutant. AAAV, BAAV, caprine AAV, bovine AAV, AAVhE1.1. AAVhEr1.5, AAVhER1.14, AAVhEr1.8, AAVhEr1.16, AAVhEr1.18, AAVhEr1.35, AAVhEr1.7, AAVhEr1.36, AAVhEr2.29, AAVhEr2.4, AAVhEr2.16, AAVhEr2.30, AAVhEr2.31, AAVhEr2.36, AAVhER1.23. AAVhEr3.1, AAV2.5T, AAV-PAEC, AAV-LK01, AAV-LK02, AAV-LK03, AAV-LK04, AAV-LK05, AAV-LK06, AAV-LK07, AAV-LK08, AAV-LK09, AAV-LK10, AAV-LK11, AAV-LK12, AAV-LK13, AAV-LK14, AAV-LK15, AAV-LK16, AAV-LK17, AAV-LK18, AAV-LK19, AAV-PAEC2, AAV-PAEC4, AAV-PAEC6, AAV-PAEC7, AAV-PAEC8, AAV-PAEC11, AAV-PAEC12, AAV-2-pre-miRNA-101, AAV-8h, AAV-8b, AAV-h, AAV-b, AAV SM 10-2, AAV Shuffle 100-1, AAV Shuffle 100-3, AAV Shuffle 100-7, AAV Shuffle 10-2, AAV Shuffle 10-6, AAV Shuffle 10-8, AAV Shuffle 100-2, AAV SM 10-1, AAV SM 10-8, AAV SM 100-3, AAV SM 100-10, BNP61 AAV, BNP62 AAV, BNP63 AAV, AAVrh.50, AAVrh.43, AAVrh.62, AAVrh.48, AAVhu.19, AAVhu.11, AAVhu.53, AAV4-8/rh.64, AAVLG-9/hu.39, AAV54.5/hu.23, AAV54.2/hu.22, AAV54.7/hu.24, AAV54.1/hu.21, AAV54.4R/hu.27, AAV46.2/hu.28, AAV46.6/hu.29, AAV128.1/hu.43, true type AAV (ttAAV), UPENN AAV 10, Japanese AAV10 serotypes, AAV CBr-7.1, AAV CBr-7.10, AAV CBr-7.2, AAV CBr-7.3, AAV CBr-7.4, AAV CBr-7.5, AAV CBr-7.7, AAV CBr-7.8, AAV CBr-B7.3, AAV CBr-B7.4, AAV CBr-E1, AAV CBr-E2, AAV CBr-E3, AAV CBr-E4, AAV CBr-E5, AAV CBr-e5, AAV CBr-E6, AAV CBr-E7, AAV CBr-E8, AAV CHt-1, AAV CHt-2, AAV CHt-3, AAV CHt-6.1, AAV CHt-6.10, AAV CHt-6.5, AAV CHt-6.6, AAV CHt-6.7, AAV CHt-6.8, AAV CHt-P1, AAV CHt-P2, AAV CHt-P5, AAV CHt-P6, AAV CHt-P8, AAV CHt-P9, AAV CKd-1, AAV CKd-10, AAV CKd-2, AAV CKd-3. AAV CKd-4, AAV CKd-6, AAV CKd-7, AAV CKd-8, AAV CKd-B1, AAV CKd-B2, AAV CKd-B3, AAV CKd-B4, AAV CKd-B5, AAV CKd-B6, AAV CKd-B7, AAV CKd-B8, AAV CKd-H1, AAV CKd-H2, AAV CKd-H3. AAV CKd-H4, AAV CKd-H5, AAV CKd-H6. AAV CKd-N3, AAV CKd-N4, AAV CKd-N9, AAV CLg-F1, AAV CLg-F2, AAV CLg-F3, AAV CLg-F4, AAV CLg-F5, AAV CLg-F6, AAV CLg-F7, AAV CLg-F8, AAV CLv-1, AAV CLv1-1, AAV Clv1-10, AAV CLv1-2, AAV CLv-12. AAV CLv1-3, AAV CLv-13, AAV CLv1-4, AAV Clv1-7, AAV Clv1-8, AAV Clv1-9, AAV CLv-2, AAV CLv-3, AAV CLv-4, AAV CLv-6, AAV CLv-8, AAV CLv-D1, AAV CLv-D2, AAV CLv-D3, AAV CLv-D4, AAV CLv-D5, AAV CLv-D6, AAV CLv-D7, AAV CLv-D8, AAV CLv-E1, AAV CLv-K1, AAV CLv-K3, AAV CLv-K6, AAV CLv-L4, AAV CLv-L5, AAV CLv-L6, AAV CLv-M1, AAV CLv-M11, AAV CLv-M2, AAV CLv-M5, AAV CLv-M6, AAV CLv-M7, AAV CLv-M8, AAV CLv-M9, AAV CLv-R1, AAV CLv-R2, AAV CLv-R3, AAV CLv-R4, AAV CLv-R5, AAV CLv-R6, AAV CLv-R7. AAV CLv-R8, AAV CLv-R9, AAV CSp-1, AAV CSp-10, AAV CSp-11, AAV CSp-2, AAV CSp-3, AAV CSp-4, AAV CSp-6, AAV CSp-7, AAV CSp-8, AAV CSp-8.10, AAV CSp-8.2, AAV CSp-8.4, AAV CSp-8.5, AAV CSp-8.6, AAV CSp-8.7, AAV CSp-8.8, AAV CSp-8.9, AAV CSp-9, AAV.hu.48R3, AAV.VR-355, AAV3B, AAV4, AAV5, AAVF1/HSC1, AAVF11/HSC11, AAVF12/HSC12, AAVF13/HSC13, AAVF14/HSC14, AAVF15/HSC15, AAVF16/HSC16, AAVF17/HSC17, AAVF2/HSC2, AAVF3/HSC3, AAVF4/HSC4, AAVF5/HSC5, AAVF6/HSC6, AAVF7/HSC7, AAVF8/HSC8, and/or AAVF9/HSC9 and variants thereof. In one embodiment the AAV serotype is VOY101, or a variant thereof. In one embodiment the AAV serotype is VOY201, or a variant thereof. In one embodiment the AAV serotype is VOY801, or a variant thereof. In one embodiment the AAV serotype is VOY1101, or a variant thereof.

[0298] In some embodiments, a payload comprising the nucleic acid sequence of at least one siRNA duplex targeting a gene of interest may be delivered using an AAVPHP.B particle (an AAV particle comprising a PHP.B peptide insert) to the subject in need for treating and/or ameliorating a neurological disease.

[0299] In some embodiments, a payload comprising the nucleic acid sequence of at least one siRNA duplex targeting a gene of interest may be administered using an AAVPHP.A particle (an AAV particle comprising a PHP.A peptide insert) to the subject in need for treating and/or ameliorating a neurological disease.

[0300] In some embodiments, a payload comprising the nucleic acid sequence of at least one siRNA duplex targeting a gene of interest may be administered using an AAVPHP.N particle (an AAV particle comprising a PHP.N peptide insert) to the subject in need for treating and/or ameliorating a neurological disease.

[0301] In some embodiments, a payload comprising the nucleic acid sequence of at least one siRNA duplex targeting a gene of interest may be administered using an AAV particle comprising a PHP.S peptide insert to the subject in need for treating and/or ameliorating a neurological disease.

[0302] In some embodiments, a payload comprising the nucleic acid sequence of at least one siRNA duplex targeting a gene of interest may be administered using a VOY101 AAV particle to the subject in need for treating and/or ameliorating a neurological disease. In one embodiment, the VOY101 capsid comprises the amino acid sequence of SEQ ID NO. 1. In one embodiment, the VOY101 capsid comprises the nucleic acid sequence of SEQ ID NO. 1809.

[0303] In some embodiments, a payload comprising the nucleic acid sequence of at least one siRNA duplex targeting a gene of interest may be administered using a VOY201 AAV particle to the subject in need for treating and/or ameliorating a neurological disease. In one embodiment, the VOY201 capsid comprises the amino acid sequence of SEQ ID NO. 1823. In one embodiment, the VOY201 capsid comprises the nucleic acid sequence of SEQ ID NO. 1810.

[0304] In some embodiments, a payload comprising the nucleic acid sequence encoding at least one siRNA duplex targeting a gene of interest may be administered using a VOY801 AAV particle to the subject in need for treating and/or ameliorating a neurological disease. In one embodiment, the VOY801 capsid comprises the nucleic acid sequence of SEQ ID NO. 1824.

[0305] In some embodiments, a payload comprising the nucleic acid sequence encoding at least one siRNA duplex targeting a gene of interest may be administered using a VOY1101 AAV particle to the subject in need for treating and/or ameliorating a neurological disease. In one embodiment, the VOY1101 capsid comprises the nucleic acid sequence of SEQ ID NO. 1825.

[0306] In some embodiments, a payload comprising the nucleic acid sequence of at least one siRNA duplex targeting a gene of interest may be administered using a variant of the AAV9 particle to the subject in need for treating and/or ameliorating a neurological disease.

[0307] In some embodiments, a first AAV particle comprising the nucleic acid sequence of at least one siRNA duplex (e.g., payload) targeting a gene of interest may be selected for administration to a subject, where the first AAV particle provides a higher level of viral genome to cells (e.g., astrocytes) as compared to a second AAV particle comprising the same payload. In one embodiment, the level of the first particle may provide 0.1, 0.2, 0.3, 0.4, 0.5, 0.6, 0.7, 0.8, 0.9, 1, 2, 3, 4, 5, 6, 7, 8, 9 or more than 9 times higher in cells (e.g., astrocytes) as compared to the level in cells of a subject of the second particle. In one embodiment, the level of the first particle may be 1%, 2%, 3%, 4%, 5%, 6%, 7%, 8%, 9%, 10%, 15% 20%, 25%, 30%, 35%, 40%, 45%, 50%, 55%, 60%, 65%, 70%, 75%, 80%, 85%, 90%, 95%, 99% or more than 99% higher than the level of the second particle in cells (e.g., astrocytes). In one embodiment, the level of the first particle may be 1-10%, 5-10%, 10-15%, 10-20%, 15-20%, 20-30%, 25-30%, 25-35%, 30-35%, 30-40%, 35-40%, 35-45%, 40-45%, 40-50%, 45-50%, 45-55%, 50-55%, 50-60%, 55-60%, 55-65%, 60-65%, 60-70%, 65-70%, 65-75%, 70-75%, 70-80%, 75-80%, 75-85%, 80-85%, 80-90%, 85-90%, 85-95%, 90-95%, 90-99%, or 95-99% higher than the level of the second particle in cells (e.g., astrocytes). In one embodiment, the first and second AAV particles have different serotypes.

[0308] In some embodiments, a first AAV particle comprising the nucleic acid sequence of at least one siRNA duplex targeting the gene of interest may be selected for administration to a subject, where the particle provides a higher viral genome to the astrocytes as compared to the amount seen in the liver of the subject. The first AAV particle may provide 1, 2, 3, 4, 5, 6, 7, 8, 9 or more than 9 times more viral genome to the astrocytes as compared to the amount in the liver.

[0309] In some embodiments, the siRNA duplexes targeting a gene of interest may be used as a solo therapy or in combination therapy for treatment of a disease. e.g., a neurological disease. In some embodiments, the siRNA duplexes targeting a gene of interest may be introduced directly into the CNS of a subject in need, for example, by infusion into the putamen, thalamus, and/or white matter,

siRNA Molecules

[0310] The present disclosure relates to RNA interference (RNAi) induced inhibition of gene expression for treating neurological disorders. Provided herein are siRNA duplexes or encoded dsRNA that target a gene of interest (referred to herein collectively as “siRNA molecules”). Such siRNA duplexes or encoded dsRNA can reduce or silence target gene expression in cells, for example, astrocytes or microglia, cortical, hippocampal, entorhinal, thalamic, sensory or motor neurons, thereby, ameliorating symptoms of neurological disease.

[0311] RNAi (also known as post-transcriptional gene silencing (PTGS), quelling, or co-suppression) is a post-transcriptional gene silencing process in which RNA molecules, in a sequence specific manner, inhibit gene expression, typically by causing the destruction of specific mRNA molecules. The active components of RNAi are short/small double stranded RNAs (dsRNAs), called small interfering RNAs (siRNAs), that typically contain 15-30 nucleotides (e.g., 19 to 25, 19 to 24 or 19-21 nucleotides) and 2 nucleotide 3′ overhangs and that match the nucleic acid sequence of the target gene. These short RNA species may be naturally produced in vivo by Dicer-mediated cleavage of larger dsRNAs and they are functional in mammalian cells.

[0312] Naturally expressed small RNA molecules, named microRNAs (miRNAs), elicit gene silencing by regulating the expression of mRNAs. The miRNAs containing RNA Induced Silencing Complex (RISC) targets mRNAs presenting a perfect sequence complementarity with nucleotides 2-7 in the 5′ region of the miRNA which is called the seed region, and other base pairs with its 3′ region. miRNA mediated down regulation of gene expression may be caused by cleavage of the target mRNAs, translational inhibition of the target mRNAs, or mRNA decay. miRNA targeting sequences are usually located in the 3′-UTR of the target mRNAs. A single miRNA may target more than 100 transcripts from various genes, and one mRNA may be targeted by different miRNAs.

[0313] siRNA duplexes or dsRNA targeting a specific mRNA may be designed and synthesized in vitro and introduced into cells for activating RNAi processes. Elbashir et al. demonstrated that 21-nucleotide siRNA duplexes (termed small interfering RNAs) were capable of effecting potent and specific gene knockdown without inducing immune response in mammalian cells (Elbashir S M et al., Nature, 2001, 411, 494-498). Since this initial report, post-transcriptional gene silencing by siRNAs quickly emerged as a powerful tool for genetic analysis in mammalian cells and has the potential to produce novel therapeutics.

[0314] In vitro synthetized siRNA molecules may be introduced into cells in order to activate RNAi. An exogenous siRNA duplex, when it is introduced into cells, similar to the endogenous dsRNAs, can be assembled to form the RNA Induced Silencing Complex (RISC), a multiunit complex that facilitates searching through the genome for RNA sequences that are complementary to one of the two strands of the siRNA duplex (i.e., the antisense strand). During the process, the sense strand (or passenger strand) of the siRNA is lost from the complex, while the antisense strand (or guide strand) of the siRNA is matched with its complementary RNA. In particular, the targets of siRNA containing RISC complex are mRNAs presenting a perfect sequence complementarity. Then, siRNA mediated gene silencing occurs, cleaving, releasing and degrading the target.

[0315] The siRNA duplex comprised of a sense strand homologous to the target mRNA and an antisense strand that is complementary to the target mRNA offers much more advantage in terms of efficiency for target RNA destruction compared to the use of the single strand (ss)-siRNAs (e.g. antisense strand RNA or antisense oligonucleotides). In many cases it requires higher concentration of the ss-siRNA to achieve the effective gene silencing potency of the corresponding duplex.

[0316] Any of the foregoing molecules may be encoded by an AAV particle or viral genome.

### Target Genes

[0317] Non-limiting examples of the neurological diseases which may be treated with the modulatory polynucleotides described herein include tauopathics, Alzheimer Disease, Huntington's Disease, and/or Amyotrophic Lateral Sclerosis. Target genes may be any of the genes associated with any neurological disease such as, but not limited to, those listed herein.

[0318] In one embodiment, the target gene is an allele of the apolipoprotein E (APOE) gene (e.g., ApoE2, ApoE3, and/or ApoE4). As a non-limiting example, the target gene is APOE and the target gene has one of the sequences taught in Table 2, a fragment or variant thereof.

[0319] In another embodiment, the target gene is superoxide dismutase (SOD1), e.g., human SOD1. As a non-limiting example, the target gene is SOD1 and the target gene has a sequence of SEQ ID NO: 1753 (NCBI reference number NM_000454.4), a fragment or variant thereof.

[0320] In another embodiment, the target gene is huntingtin (HTT), e.g., human HTT. As a non-limiting example, the target gene is HTT and the target gene has a sequence of SEQ ID NO: 1754 (NCBI reference number NM_002111.7), a fragment or variant thereof. As a non-limiting example, the target gene is HTT and the target gene encodes an amino acid sequence of SEQ ID NO: 1755 (NCBI reference number NP_002102.4), a fragment or variant thereof.

[0321] In yet another embodiment, the target gene is microtubule-associated protein tau (MAPT). As a non-limiting example, the target gene is MAPT and the target gene has a sequence of any of the nucleic acid sequences shown in Table 9, a fragment or variant thereof. As a non-limiting example, the target gene is MAPT and the target gene encodes an amino acid sequence of any of the amino acid sequences shown in Table 9, a fragment or variant thereof.

TABLE 9
Microtubule-Associated Protein Tau Sequences

| Identification | Reference | SEQ ID NO |
|---|---|---|
| MAPT SEQ-001 | NP_058519.3 | 1756 |
| MAPT SEQ-002 | NP_005901.2 | 1757 |
| MAPT SEQ-003 | NP_058518.1 | 1758 |
| MAPT SEQ-004 | NP_058525.1 | 1759 |
| MAPT SEQ-005 | NP_001116539.1 | 1760 |
| MAPT SEQ-006 | NP_001116538.2 | 1761 |
| MAPT SEQ-007 | NP_001190180.1 | 1762 |
| MAPT SEQ-008 | NP_001190181.1 | 1763 |
| MAPT SEQ-009 | NM_016835.4 | 1764 |
| MAPT SEQ-010 | NM_005910.5 | 1765 |
| MAPT SEQ-011 | NM_016834.4 | 1766 |
| MAPT SEQ-012 | NM_016841.4 | 1767 |
| MAPT SEQ-013 | NM_001123067.3 | 1768 |
| MAPT SEQ-014 | NM_001123066.3 | 1769 |
| MAPT SEQ-015 | NM_001203251.1 | 1770 |
| MAPT SEQ-016 | NM_001203252.1 | 1771 |

[0322] In some embodiments, the target gene may be a gene when overexpressed or mutated, causing a neurological disorder, for example, MECP2 (methyl CpG binding protein 2 gene), and RCAN1 (Regulator of Calcineurin 1).

Design and Sequences of siRNA Duplexes

[0323] Some guidelines for designing siRNAs have been proposed in the art. These guidelines generally recommend generating a 19-nucleotide duplexed region, symmetric 2-3 nucleotide 3′overhangs, 5-phosphate and 3-hydroxyl groups targeting a region in the gene to be silenced. Other rules that may govern siRNA sequence preference include, but are not limited to, (i) A/U at the 5′ end of the antisense strand; (ii) G/C at the 5′ end of the sense strand; (iii) at least five A/U residues in the 5′ terminal one-third of the antisense strand; and (iv) the absence of any GC stretch of more than 9 nucleotides in length. In accordance with such consideration, together with the specific sequence of a target gene, highly effective siRNA molecules essential for suppressing mammalian target gene expression may be readily designed.

[0324] According to the present disclosure, siRNA molecules (e.g., siRNA duplexes or encoded dsRNA) that target a gene of interest are designed. Such siRNA molecules can specifically, suppress target gene expression and protein production. In some aspects, the siRNA molecules are designed and used to selectively “knock out” target gene variants in cells, i.e., transcripts that are identified in neurological disease. In some aspects, the siRNA molecules are designed and used to selectively “knock down” target gene variants in cells.

[0325] In one embodiment, an siRNA molecule of the present disclosure comprises a sense strand and a complementary antisense strand in which both strands are hybridized together to form a duplex structure. The antisense strand has sufficient complementarity to the target mRNA sequence to direct target-specific RNAi, i.e., the siRNA molecule has a sequence sufficient to trigger the destruction of the target mRNA by the RNAi machinery or process.

[0326] In some embodiments, the antisense strand and target mRNA sequences have 100% complementarity. The antisense strand may be complementary to any part of the target mRNA sequence.

[0327] In other embodiments, the antisense strand and target mRNA sequences comprise at least one mismatch. As a non-limiting example, the antisense strand and the target mRNA sequence have at least 30%, 40%, 50%, 60%, 70%, 80%, 81%, 82%, 83%, 84%, 85%, 86%, 87%, 88%, 89%, 90%, 91%, 92%, 93%, 94%, 95%, 96%, 97%, 98% or 99% or at least 20-30%, 20-40%, 20-50%, 20-60%, 20-70%, 20-80%, 20-90%, 20-95%, 20-99%, 30-40%, 30-50%, 30-60%, 30-70%, 30-80%, 30-90%, 30-95%, 30-99%, 40-50%, 40-60%, 40-70%, 40-80%, 40-90%, 40-95%, 40-99%, 50-60%, 50-70%, 50-80%, 50-90%, 50-95%, 50-99%, 60-70%, 60-80%, 60-90%, 60-95%, 60-99%, 70-80%, 70-90%, 70-95%, 70-99%, 80-90%, 80-95%, 80-99%, 90-95%, 90-99% or 95-99% complementary.

[0328] According to the present disclosure, the siRNA molecule has a length from about 10-50 or more nucleotides, i.e., each strand comprising 10-50 nucleotides (or nucleotide analogs). Preferably, the siRNA molecule has a length from about 15-30, e.g., 15, 16, 17, 18, 19, 20, 21, 22, 23, 24, 25, 26, 27, 28, 29, or 30 nucleotides in each strand, wherein one of the strands is sufficiently complementary to a target region. In one embodiment, the siRNA molecule has a length from about 19 to 25, 19 to 24 or 19 to 21 nucleotides.

[0329] In some embodiments, the siRNA molecules of the present disclosure can be synthetic RNA duplexes comprising about 19 nucleotides to about 25 nucleotides, and two overhanging nucleotides at the 3′-end. In some aspects, the siRNA molecules may be unmodified RNA molecules. In other aspects, the siRNA molecules may contain at least one modified nucleotide, such as base, sugar or backbone modifications.

[0330] In one embodiment, the siRNA molecules of the present disclosure may comprise an antisense sequence and a sense sequence, or a fragment or variant thereof. As a non-limiting example, the antisense sequence and the sense sequence have at least 30%, 40%, 50%, 60%, 70%, 80%, 81%, 82%, 83%, 84%, 85%, 86%, 87%, 88%, 89%, 90%, 91%, 92%, 93%, 94%, 95%, 96%, 97%, 98% or 99% or at least 20-30%, 20-40%, 20-50%, 20-60%, 20-70%, 20-80%, 20-90%, 20-95%, 20-99%, 30-40%, 30-50%, 30-60%, 30-70%, 30-80%, 30-90%, 30-95%, 30-99%, 40-50%, 40-60%, 40-70%, 40-80%, 40-90%, 40-95%, 40-99%, 50-60%, 50-70%, 50-80%, 50-90%, 50-95%, 50-99%, 60-70%, 60-80%, 60-90%, 60-95%, 60-99%, 70-80%, 70-90%, 70-95%, 70-99%, 80-90%, 80-95%, 80-99%, 90-95%, 90-99% or 95-99% complementary.

[0331] DNA expression plasmids can be used to stably express the siRNA duplexes or dsRNA of the present disclosure in cells and achieve long-term inhibition of the target gene. In one aspect, the sense and antisense strands of a siRNA duplex are typically linked by a short spacer sequence leading to the expression of a stem-loop structure termed short hairpin RNA (shRNA). The hairpin is recognized and cleaved by Dicer, thus generating mature siRNA molecules.

[0332] In other embodiments, the siRNA molecules of the present disclosure can be encoded in AAV particles for delivery to a cell. In one embodiment, the siRNA may be inserted to an AAV viral genome, flanked by the ITRs.

[0333] According to the present disclosure, the AAV particles comprising the nucleic acids encoding the siRNA molecules targeting mRNA of a gene of interest may be and/or include a AAV particle serotype, and/or a peptide insert such as, but not limited to, VOY101, VOY201, VOY801, VOY1101, AAVPHP.B (PHP.B), AAVPHP.A (PHP.A), AAVG2B-26, AAVG2B-13, AAVTH1.1-32, AAVTH1.1-35, AAVPHP.B2 (PHP.B2), AAVPHP.B3 (PHP.B3), AAVPHP.N/PHP.B-DGT, AAVPHP.B-EST, AAVPHP.B-GGT, AAVPHP.B-ATP, AAVPHP.B-ATT-T, AAVPHP.B-DGT-T, AAVPHP.B-GGT-T, AAVPHP.B-SGS, AAVPHP.B-AQP, AAVPHP.B-QQP, AAVPHP.B-SNP(3), AAVPHP.B-SNP, AAVPHP.B-QGT, AAVPHP.B-NQT, AAVPHP.B-EGS, AAVPHP.B-SGN, AAVPHP.B-EGT, AAVPHP.B-DST, AAVPHP.B-DST, AAVPHP.B-STP, AAVPHP.B-PQP, AAVPHP.B-SQP, AAVPHP.B-QLP, AAVPHP.B-TMP, AAVPHP.B-TTP, AAVPHP.S/G2A12, AAVG2A15/G2A3 (G2A3), AAVG2B4 (G2B4), AAVG2B5. PHP.S. AAV1, AAV2, AAV2G9, AAV3, AAV3a, AAV3b, AAV3-3, AAV4, AAV4-4, AAV5, AAV6, AAV6.1, AAV6.2, AAV6.1.2, AAV7, AAV7.2, AAV8, AAV9, AAV9.11, AAV9.13, AAV9.16, AAV9.24, AAV9.45, AAV9.47, AAV9.61, AAV9.68, AAV9.84, AAV9.9, AAV10, AAV11, AAV12, AAV16.3, AAV24.1, AAV27.3, AAV42.12, AAV42-1b, AAV42-2, AAV42-3a, AAV42-3b, AAV42-4, AAV42-5a, AAV42-5b, AAV42-6b, AAV42-8, AAV42-10, AAV42-11, AAV42-12, AAV42-13, AAV42-15, AAV42-aa, AAV43-1, AAV43-12, AAV43-20, AAV43-21, AAV43-23, AAV43-25, AAV43-5, AAV44.1, AAV44.2, AAV44.5, AAV223.1. AAV223.2, AAV223.4, AAV223.5, AAV223.6, AAV223.7, AAV1-7/rh.48, AAV1-8/rh.49, AAV2-15/rh.62, AAV2-3/rh.61, AAV2-4/rh.50, AAV2-5/rh.51, AAV3.1/hu.6, AAV3.1/hu.9, AAV3-9/rh.52, AAV3-11/rh.53, AAV4-8/r11.64, AAV4-9/rh.54, AAV4-19/rh.55, AAV5-3/rh.57, AAV5-22/rh.58, AAV7.3/hu.7, AAV16.8/hu.10, AAV16.12/hu.11, AAV29.3/bb.1, AAV29.5/bb.2, AAV106.1/hu.37, AAV114.3/hu.40, AAV127.2/hu.41, AAV127.5/hu.42, AAV128.3/hu.44, AAV130.4/hu.48, AAV145.1/hu.53, AAV145.5/hu.54, AAV145.6/hu.55, AAV161.10/hu.60, AAV161.6/hu.61, AAV33.12/hu.17, AAV33.4/hu.15, AAV33.8/hu.16, AAV52/hu.19, AAV52.1/hu.20, AAV58.2/hu.25, AAVA3.3, AAVA3.4, AAVA3.5, AAVA3.7, AAVC1, AAVC2, AAVC5, AAV-DJ. AAV-DJ8, AAVF3, AAVF5, AAVH2. AAVrh.72, AAVhu.8, AAVrh.68, AAVrh.70, AAVpi.1, AAVpi.3, AAVpi.2, AAVrh.60, AAVrh.44, AAVrh.65, AAVrh.55, AAVrh.47, AAVrh.69, AAVrh.45, AAVrh.59, AAVhu.12, AAVH6, AAVLK03, AAVH-1/hu.1, AAVH-5/hu.3, AAVLG-10/rh.40, AAVLG-4/rh.38, AAVLG-9/hu.39, AAVN721-8/rh.43. AAVCh.5, AAVCh.5R1, AAVcy.2. AAVcy.3, AAVcy.4, AAVcy.5. AAVCy.5R1, AAVCy.5R2, AAVCy.5R3, AAVCy.5R4, AAVcy.6, AAVhu.1, AAVhu.2, AAVhu.3, AAVhu.4, AAVhu.5, AAVhu.6, AAVhu.7, AAVhu.9, AAVhu.10, AAVhu.11, AAVhu.13, AAVhu.15, AAVhu.16, AAVhu.17, AAVhu.18, AAVhu.20, AAVhu.21, AAVhu.22, AAVhu.23.2, AAVhu.24, AAVhu.25, AAVhu.27, AAVhu.28, AAVhu.29, AAVhu.29R. AAVhu.31, AAVhu.32, AAVhu.34, AAVhu.35, AAVhu.37, AAVhu.39, AAVhu.40, AAVhu.41, AAVhu.42, AAVhu.43, AAVhu.44, AAVhu.44R1, AAVhu.44R2, AAVhu.44R3. AAVhu.45, AAVhu.46, AAVhu.47, AAVhu.48, AAVhu.48R1, AAVhu.48R2, AAVhu.48R3, AAVhu.49, AAVhu.51, AAVhu.52, AAVhu.54, AAVhu.55, AAVhu.56, AAVhu.57, AAVhu.58, AAVhu.60, AAVhu.61, AAVhu.63, AAVhu.64, AAVhu.66, AAVhu.67, AAVhu.14/9, AAVhu.t 19, AAVrh.2, AAVrh.2R, AAVrh.8, AAVrh.8R, AAVrh.10, AAVrh.12, AAVrh.13, AAVrh.13R, AAVrh.14, AAVrh.17, AAVrh.18, AAVrh.19, AAVrh.20, AAVrh.21. AAVrh.22, AAVrh.23, AAVrh.24, AAVrh.25, AAVrh.31, AAVrh.32, AAVrh.33, AAVrh.34, AAVrh.35. AAVrh.36, AAVrh.37, AAVrh.37R2, AAVrh.38, AAVrh.39, AAVrh.40, AAVrh.46, AAVrh.48, AAVrh.48.1, AAVrh.48.1.2, AAVrh.48.2, AAVrh.49, AAVrh.51, AAVrh.52, AAVrh.53, AAVrh.54, AAVrh.56, AAVrh.57, AAVrh.58, AAVrh.61, AAVrh.64, AAVrh.64R1, AAVrh.64R2, AAVrh.67, AAVrh.73, AAVrh.74, AAVrh8R, AAVrh8R A586R mutant, AAVrh8R R533A mutant, AAAV, BAAV, caprine AAV, bovine AAV, AAVhE1.1, AAVhEr1.5, AAVhER1.14, AAVhEr1.8, AAVhEr1.16, AAVhEr1.18, AAVhEr1.35, AAVhEr1.7, AAVhEr1.36, AAVhEr2.29, AAVhEr2.4, AAVhEr2.16, AAVhEr2.30, AAVhEr2.31, AAVhEr2.36, AAVhER1.23, AAVhEr3.1, AAV2.5T, AAV-PAEC, AAV-LK01, AAV-LK02, AAV-LK03, AAV-LK04, AAV-LK05, AAV-LK06, AAV-LK07, AAV-LK08, AAV-LK09, AAV-LK10, AAV-LK11, AAV-LK12, AAV-LK13, AAV-LK14, AAV-LK15, AAV-LK16, AAV-LK17, AAV-LK18, AAV-LK19, AAV-PAEC2, AAV-PAEC4, AAV-PAEC6, AAV-PAEC7. AAV-PAEC8, AAV-PAEC11, AAV-PAEC12, AAV-2-pre-miRNA-101, AAV-8h, AAV-8b, AAV-h, AAV-b, AAV SM 10-2. AAV Shuffle 100-1, AAV Shuffle 100-3, AAV Shuffle 100-7, AAV Shuffle 10-2, AAV Shuffle 10-6, AAV Shuffle 10-8, AAV Shuffle 100-2, AAV SM 10-1, AAV SM 10-8, AAV SM 100-3, AAV SM 100-10, BNP61 AAV, BNP62 AAV. BNP63 AAV, AAVrh.50, AAVrh.43, AAVrh.62. AAVrh.48, AAVhu.19, AAVhu.11, AAVhu.53, AAV4-8/rh.64, AAVLG-9/hu.39, AAV54.5/hu.23, AAV54.2/hu.22, AAV54.7/hu.24, AAV54.1/hu.21, AAV54.4R/hu.27, AAV46.2/hu.28, AAV46.6/hu.29, AAV128.1/hu.43, true type AAV (ttAAV), UPENN AAV10, Japanese AAV10 serotypes, AAV CBr-7.1, AAV CBr-7.10. AAV CBr-7.2, AAV CBr-7.3, AAV CBr-7.4, AAV CBr-7.5. AAV CBr-7.7, AAV CBr-7.8, AAV CBr-B7.3, AAV CBr-B7.4, AAV CBr-E1, AAV CBr-E2, AAV CBr-E3, AAV CBr-E4, AAV CBr-E5, AAV CBr-e5, AAV CBr-E6, AAV CBr-E7, AAV CBr-E8, AAV CHt-1, AAV CHt-2, AAV CHt-3, AAV CHt-6.1, AAV CHt-6.10, AAV CHt-6.5, AAV CHt-6.6, AAV CHt-6.7, AAV CHt-6.8, AAV CHt-P1, AAV CHt-P2, AAV CHt-P5, AAV CHt-P6, AAV CHt-P8, AAV CHt-P9, AAV CKd-1, AAV CKd-10, AAV CKd-2, AAV CKd-3, AAV CKd-4, AAV CKd-6, AAV CKd-7. AAV CKd-8, AAV CKd-B1, AAV CKd-B2, AAV CKd-B3, AAV CKd-B4, AAV CKd-B5, AAV CKd-B6, AAV CKd-B7, AAV CKd-B8, AAV CKd-H1, AAV CKd-H2, AAV CKd-H3, AAV CKd-H4, AAV CKd-H5, AAV CKd-H6, AAV CKd-N3, AAV CKd-N4, AAV CKd-N9, AAV CLg-F1, AAV CLg-F2. AAV CLg-F3, AAV CLg-F4, AAV CLg-F5, AAV CLg-F6, AAV CLg-F7, AAV CLg-F8, AAV CLv-1, AAV CLv1-1, AAV Clv1-10, AAV CLv1-2, AAV CLv-12, AAV CLv1-3, AAV CLv-13, AAV CLv1-4, AAV Clv1-7, AAV Clv1-8, AAV Clv1-9, AAV CLv-2, AAV CLv-3, AAV CLv-4, AAV CLv-6, AAV CLv-8, AAV CLv-D1, AAV CLv-D2, AAV CLv-D3, AAV CLv-D4. AAV CLv-D5, AAV CLv-D6, AAV CLv-D7, AAV CLv-D8, AAV CLv-E1, AAV CLv-K1, AAV CLv-K3, AAV CLv-K6, AAV CLv-L4, AAV CLv-L5, AAV CLv-L6, AAV CLv-M1, AAV CLv-M11, AAV CLv-M2, AAV CLv-M5, AAV CLv-M6, AAV CLv-M7, AAV CLv-M8, AAV CLv-M9, AAV CLv-R1, AAV CLv-R2, AAV CLv-R3, AAV CLv-R4, AAV CLv-R5, AAV CLv-R6, AAV CLv-R7, AAV CLv-R8, AAV CLv-R9, AAV CSp-1, AAV CSp-10, AAV CSp-11, AAV CSp-2, AAV CSp-3, AAV CSp-4, AAV CSp-6, AAV CSp-7, AAV CSp-8, AAV CSp-8.10, AAV CSp-8.2, AAV CSp-8.4, AAV CSp-8.5, AAV CSp-8.6, AAV CSp-8.7, AAV CSp-8.8, AAV CSp-8.9, AAV CSp-9, AAV.hu.48R3, AAV.VR-355, AAV3B, AAV4, AAV5, AAVF1/HSC1, AAVF11/HSC11, AAVF12/HSC12, AAVF13/HSC13, AAVF14/HSC14, AAVF15/HSC15, AAVF16/HSC16, AAVF17/HSC17, AAVF2/HSC2, AAVF3/HSC3, AAVF4/HSC4, AAVF5/HSC5, AAVF6/HSC6, AAVF7/HSC7, AAVF8/HSC8, and/or AAVF9/HSC9 and variants thereof. In one embodiment, the AAV serotype is VOY101, or a variant thereof. In one embodiment, the AAV serotype is VOY201, or a variant thereof. In one embodiment, the AAV serotype is VOY801, or a variant thereof. In one embodiment, the AAV serotype is VOY1101, or a variant thereof.

[0334] In some embodiments, the siRNA duplexes or encoded dsRNA of the present disclosure suppress (or degrade) target mRNA. Accordingly, the siRNA duplexes or encoded dsRNA can be used to substantially inhibit target gene expression in a cell, for example a neuron or astrocyte. In some aspects, the inhibition of target gene expression refers to an inhibition by at least about 20%, preferably by at least about 30%, 40%, 50%, 60%, 70%, 80%, 85%, 90%, 95% and 100%, or at least 20-30%, 20-40%, 20-50%, 20-60%, 20-70%, 20-80%, 20-90%, 20-95%, 20-100%, 3040%, 30-50%, 30-60%, 30-70%, 30-80%, 30-90%, 30-95%, 30-100%, 40-50%, 40-60%, 40-70%, 40-80%, 40-90%, 40-95%, 40-100%, 50-60%, 50-70%, 50-80%, 50-90%, 50-95%, 50-100%, 60-70%, 60-80%, 60-90%, 60-95%, 60-100%, 70-80%, 70-90%, 70-95%, 70-100%, 80-90%, 80-95%, 80-100%, 90-95%, 90-100% or 95-100%. Accordingly, the protein product of the targeted gene may be inhibited by at least about 20%, preferably by at least about 30%, 40%, 50%, 60%, 70%, 80%, 85%, 90%, 95% and 100%, or at least 20-30%, 2040%, 20-50%, 20-60%, 20-70%, 20-80%, 20-90%, 20-95%, 20-100%, 3040%, 30-50%, 30-60%, 30-70%, 30-80%, 30-90%, 30-95%, 30-100%, 40-50%, 40-60%, 40-70%, 40-80%, 40-90%, 40-95%, 40-100%, 50-60%, 50-70%, 50-80%, 50-90%, 50-95%, 50-100%, 60-70%, 60-80%, 60-90%, 60-95%, 60-100%, 70-80%, 70-90%, 70-95%, 70-100%, 80-90%, 80-95%, 80-100%, 90-95%, 90-100% or 95-100%.

[0335] In some embodiments, siRNA molecules targeting a gene of interest may be designed using any available design tools. According to the present disclosure, the siRNA molecules are designed and tested for their ability in reducing target gene mRNA levels in cultured cells.

[0336] In one embodiment, the siRNA molecules are designed and tested for their ability in reducing ApoE2 levels in cultured cells.

[0337] In one embodiment, the siRNA molecules are designed and tested for their ability in reducing ApoE3 levels in cultured cells.

[0338] In one embodiment, the siRNA molecules are designed and tested for their ability in reducing ApoE4 levels in cultured cells.

[0339] In one embodiment, the siRNA molecules are designed and tested for their ability in reducing SOD1 levels in cultured cells.

[0340] In one embodiment, the siRNA molecules are designed and tested for their ability in reducing HTT levels in cultured cells.

[0341] In one embodiment, the siRNA molecules are designed and tested for their ability in reducing Tau levels in cultured cells.

[0342] In one embodiment, the siRNA molecules comprise a miRNA seed match for the guide strand. In another embodiment, the siRNA molecules comprise a miRNA seed match for the passenger strand. In yet another embodiment, the siRNA duplexes or encoded dsRNA targeting a gene of interest do not comprise a seed match for the guide or passenger strand.

[0343] In one embodiment, the siRNA duplexes or encoded dsRNA targeting a gene of interest may have almost no significant full-length off targets for the guide strand. In another embodiment, the siRNA duplexes or encoded dsRNA targeting a gene of interest may have almost no significant full-length off targets for the passenger strand. The siRNA duplexes or encoded dsRNA targeting a gene of interest may have less than 1%, 2%, 3%, 4%, 5%, 6%, 7%, 8%, 9%, 10%, 11%, 12%, 13%, 14%, 15%, 20%, 25%, 30%, 35%, 40%, 45%, 50%, 1-5%, 2-6/o, 3-7%, 4-8%, 5-9%, 5-10%, 6-10%, 5-15%, 5-20%, 5-25%5-30%, 10-20%, 10-30%, 10-40%, 10-50%, 15-30%, 15-40%, 15-45%, 20-40%, 20-50%, 25-50%, 30-40%, 30-50%, 35-50%, 40-50%, 45-50% full-length off targets for the passenger strand. In yet another embodiment, the siRNA duplexes or encoded dsRNA targeting a gene of interest may have almost no significant full-length off targets for the guide strand or the passenger strand. The siRNA duplexes or encoded dsRNA targeting a gene of interest may have less than 1%, 2%, 3%, 4%, 5%, 6%, 7%, 8% 9%, 10%, 11%, 12%, 13%, 14%, 15%, 20%, 25%, 30%, 35%, 40%, 45%, 50%, 1-5%, 2-6%, 3-7%, 4-8%, 5-9%, 5-10%, 6-10%, 5-15%, 5-20%, 5-25% 5-30%, 10-20%, 10-30%, 10-40%, 10-50%, 15-30%, 15-40%, 15-45%, 20-40%, 20-50%, 25-50%, 30-40%, 30-50%, 35-50%, 40-50%, 45-50% full-length off targets for the guide or passenger strand.

[0344] In one embodiment, the siRNA duplexes or encoded dsRNA targeting a gene of interest may have high activity in vitro. In another embodiment, the siRNA molecules may have low activity in vitro. In yet another embodiment, the siRNA duplexes or dsRNA targeting the gene of interest may have high guide strand activity and low passenger strand activity in vitro.

[0345] In one embodiment, the siRNA molecules have a high guide strand activity and low passenger strand activity in vitro. The target knock-down (KD) by the guide strand may be at least 60%, 65%, 70%, 75%, 80%, 85%, 90%, 95%, 99%, 99.5% or 100%. The target knock-down by the guide strand may be 60-65%, 60-70%, 60-75%, 60-80%, 60-85%, 60-90%, 60-95%, 60-99%, 60-99.5%, 60-100%, 65-70%, 65-75%, 65-80%, 65-85%, 65-90%, 65-95%, 65-99%, 65-99.5%, 65-100%, 70-75%, 70-80%, 70-85%, 70-90%, 70-95%, 70-99%, 70-99.5%, 70-100%, 75-80%, 75-85%, 75-90%, 75-95%, 75-99%, 75-99.5%, 75-100%, 80-85%, 80-90%, 80-95%, 80-99%, 80-99.5%, 80-100%, 85-90%, 85-95%, 85-99%, 85-99.5%, 85-100%, 90-95%, 90-99%, 90-99.5%, 90-100%, 95-99%, 95-99.5%, 95-100%, 99-99.5%, 99-100% or 99.5-100%. As a non-limiting example, the target knock-down (KD) by the guide strand is greater than 70%.

[0346] In one embodiment, the IC₅₀ of the passenger strand for the nearest off target is greater than 100 multiplied by the IC₅₀ of the guide strand for the target. As a non-limiting example, if the IC₅₀ of the passenger strand for the nearest off target is greater than 100 multiplied by the IC₅₀ of the guide strand for the target then the siRNA molecules is said to have high guide strand activity and a low passenger strand activity in vitro.

[0347] In one embodiment, the 5′ processing of the guide strand has a correct start (n) at the 5′ end at least 75%, 80%, 85%, 90%, 95%, 99% or 100% of the time in vitro or in vivo. As a non-limiting example, the 5′ processing of the guide strand is precise and has a correct start (n) at the 5′ end at least 99% of the time in vitro. As a non-limiting example, the 5′ processing of the guide strand is precise and has a correct start (n) at the 5′ end at least 99% of the time in vivo.

[0348] In one embodiment, the guide to passenger (G:P) (also referred to as the antisense to sense) strand ratio expressed is 1:10, 1:9, 1:8, 1:7, 1:6, 1:5, 1:4, 1:3, 1:2, 1:1, 2:10, 2:9, 2:8, 2:7, 2:6, 2:5, 2:4, 2:3, 2:2, 2:1, 3:10, 3:9, 3:8, 3:7, 3:6, 3:5, 3:4, 3:3.3:2, 3:1, 4:10, 4:9, 4:8, 4:7, 4:6, 4:5, 4:4, 4:3, 4:2, 4:1, 5:10, 5:9, 5:8, 5:7, 5:6, 5:5, 5:4, 5:3, 5:2, 5:1, 6:10, 6:9, 6:8, 6:7, 6:6, 6:5, 6:4, 6:3, 6.2, 6:1, 7:10, 7:9, 7:8, 7:7, 7:6, 7:5, 7:4, 7:3.7:2, 7:1, 8:10, 8:9, 8:8, 8:7, 8:6, 8:5, 8:4, 8:3, 8:2, 8:1, 9:10, 9:9, 9:8, 9:7, 9:6, 9:5, 9:4, 9:3, 9:2, 9:1, 10:10, 10:9, 10:8, 10:7, 10:6, 10:5, 10:4, 10:3, 10:2, 10:1, 1:99, 5:95, 10:90, 15:85, 20:80, 25:75, 30:70, 35:65, 40:60, 45:55, 50:50, 55:45, 60:40, 65:35, 70:30, 75:25, 80:20, 85:15, 90:10, 95:5, or 99:1 n vitro or in vivo. The guide to passenger ratio refers to the ratio of the guide strands to the passenger strands after the excision of the guide strand. For example, an 80:20 guide to passenger ratio would have 8 guide strands to every 2 passenger strands clipped out of the precursor. As a non-limiting example, the guide-to-passenger strand ratio is 80:20 in vitro. As a non-limiting example, the guide-to-passenger strand ratio is 80:20 in vivo. As a non-limiting example, the guide-to-passenger strand ratio is 8:2 in vitro. As a non-limiting example, the guide-to-passenger strand ratio is 8:2 in vivo. As a non-limiting example, the guide-to-passenger strand ratio is 9:1 in vitro. As a non-limiting example, the guide-to-passenger strand ratio is 9:1 in vivo.

[0349] In one embodiment, the passenger to guide (P:G) (also referred to as the sense to antisense) strand ratio expressed is 1:10, 1:9, 1:8, 1:7, 1:6, 1:5, 1:4, 1:3, 1:2, 1:1, 2:10, 2:9, 2:8, 2:7, 2:6, 2:5, 2:4, 2:3, 2:2, 2:1, 3:10, 3:9, 3:8, 3:7, 3:6, 3:5, 3:4, 3:3, 3:2, 3:1, 4:10, 4:9, 4:8, 4:7, 4:6, 4:5, 4:4, 4:3, 4:2, 4:1, 5:10, 5:9, 5:8, 5:7, 5:6, 5:5, 5:4, 53, 5:2, 5:1.6:10, 6:9, 6:8, 6:7, 6:6, 6:5, 6:4, 6:3, 6:2, 6:1, 7:10, 7:9, 7:8, 7:7, 7:6, 7:5, 7:4.7:3, 7:2, 7:1, 8:10, 8:9, 8:8, 8:7, 8:6, 8:5, 8:4, 8:3, 8:2, 8:1, 9:10, 9:9, 9:8, 9:7, 9:6, 9:5, 9:4, 9:3, 9:2, 9:1, 10:10, 10:9, 10:8, 10:7, 10:6, 10:5, 10:4, 10:3, 10:2, 10:1, 1:99, 5:95, 10:90, 15:85, 20:80, 25:75, 30:70, 35:65, 40:60, 45:55, 50:50, 55:45, 60:40, 65:35, 70:30, 75:25, 80:20, 85:15, 90:10, 95:5, or 99:1 in vitro or in vivo. The passenger to guide ratio refers to the ratio of the passenger strands to the guide strands after the excision of the guide strand. For example, an 80:20 passenger to guide ratio would have 8 passenger strands to every 2 guide strands clipped out of the precursor. As a non-limiting example, the passenger-to-guide strand ratio is 80:20 in vitro. As a non-limiting example, the passenger-to-guide strand ratio is 80:20 in vivo. As a non-limiting example, the passenger-to-guide strand ratio is 8:2 in vitro. As a non-limiting example, the passenger-to-guide strand ratio is 8:2 in vivo. As a non-limiting example, the passenger-to-guide strand ratio is 9:1 in vitro. As a non-limiting example, the passenger-to-guide strand ratio is 9:1 in vivo.

[0350] In one embodiment, the integrity of the viral genome encoding the dsRNA is at least 60%, 65%, 70%, 75%, 80%, 85%, 90%, 95%, 99% or more than 99% of the full length of the construct. As a non-limiting example, the integrity of the viral genome is 80% of the full length of the construct.

[0351] In one embodiment, the passenger and/or guide strand is designed based on the method and rules outlined in European Patent Publication No. EP1752536, the contents of which are herein incorporated by reference in their entirety. As a non-limiting example, the 3′-terminal base of the sequence is adenine, thymine or uracil. As a non-limiting example, the 5′-terminal base of the sequence is guanine or cytosine. As a non-limiting example, the 3′-terminal sequence comprises seven bases rich in one or more bases of adenine, thymine and uracil. As a non-limiting example, the base number is at such a level as causing RNA interference without expressing cytotoxicity.

### Molecular Scaffold

[0352] In one embodiment, the siRNA molecules may be encoded in a modulatory polynucleotide which also comprises a molecular scaffold. As used herein a “molecular scaffold” is a framework or starting molecule that forms the sequence or structural basis against which to design or make a subsequent molecule.

[0353] In one embodiment, the modulatory polynucleotide which comprises the payload (e.g., siRNA, miRNA or other RNAi agent described herein) includes a molecular scaffold which comprises a leading 5′ flanking sequence which may be of any length and may be derived in whole or in part from wild type microRNA sequence or be completely artificial. A 3′ flanking sequence may mirror the 5′ flanking sequence in size and origin. Either flanking sequence may be absent. In one embodiment, both the 5′ and 3′ flanking sequences are absent. The 3′ flanking sequence may optionally contain one or more CNNC motifs, where “N” represents any nucleotide.

[0354] In some embodiments the 5′ and 3′ flanking sequences are the same length.

[0355] In some embodiments the 5′ flanking sequence is from 1-10 nucleotides in length, from 5-15 nucleotides in length, from 10-30 nucleotides in length, from 20-50 nucleotides in length, greater than 40 nucleotides in length, greater than 50 nucleotides in length, greater than 100 nucleotides in length or greater than 200 nucleotides in length.

[0356] In some embodiments, the 5′ flanking sequence may be 1, 2, 3, 4, 5, 6, 7, 8, 9, 10, 11, 12, 13, 14, 15, 16, 17, 18, 19, 20, 21, 22, 23, 24, 25, 26, 27, 28, 29, 30, 31, 32, 33, 34, 35, 36, 37, 38, 39, 40, 41, 42, 43, 44, 45, 46, 47, 48, 49, 50, 51, 52, 53, 54, 55, 56, 57, 58, 59, 60, 61, 62, 63, 64, 65, 66, 67, 68, 69, 70, 71, 72, 73, 74, 75, 76, 77, 78, 79, 80, 81, 82, 83, 84, 85, 86, 87, 88, 89, 90, 91, 92, 93, 94, 95, 96, 97, 98, 99, 100, 101, 102, 103, 104, 105, 106, 107, 108, 109, 110, 111, 112, 113, 114, 115, 116, 117, 118, 119, 120, 121, 122, 123, 124, 125, 126, 127, 128, 129, 130, 131, 132, 133, 134, 135, 136, 137, 138, 139, 140, 141, 142, 143, 144, 145, 146, 147, 148, 149, 150, 151, 152, 153, 154, 155, 156, 157, 158, 159, 160, 161, 162, 163, 164, 165, 166, 167, 168, 169, 170, 171, 172, 173, 174, 175, 176, 177, 178, 179, 180, 181, 182, 183, 184, 185, 186, 187, 188, 189, 190, 191, 192, 193, 194, 195, 196, 197, 198, 199, 200, 201, 202, 203, 204, 205, 206, 207, 208, 209, 210, 211, 212, 213, 214, 215, 216, 217, 218, 219, 220, 221, 222, 223, 224, 225, 226, 227, 228, 229, 230, 231, 232, 233, 234, 235, 236, 237, 238, 239, 240, 241, 242, 243, 244, 245, 246, 247, 248, 249, 250, 251, 252, 253, 254, 255, 256, 257, 258, 259, 260, 261, 262, 263, 264, 265, 266, 267, 268, 269, 270, 271, 272, 273, 274, 275, 276, 277, 278, 279, 280, 281, 282, 283, 284, 285, 286, 287, 288, 289, 290, 291, 292, 293, 294, 295, 296, 297, 298, 299, 300, 301, 302, 303, 304, 305, 306, 307, 308, 309, 310, 311, 312, 313, 314, 315, 316, 317, 318, 319, 320, 321, 322, 323, 324, 325, 326, 327, 328, 329, 330, 331, 332, 333, 334, 335, 336, 337, 338, 339, 340, 341, 342, 343, 344, 345, 346, 347, 348, 349, 350, 351, 352, 353, 354, 355, 356, 357, 358, 359, 360, 361, 362, 363, 364, 365, 366, 367, 368, 369, 370, 371, 372, 373, 374, 375, 376, 377, 378, 379, 380, 381, 382, 383, 384, 385, 386, 387, 388, 389, 390, 391, 392, 393, 394, 395, 396, 397, 398, 399, 400, 401, 402, 403, 404, 405, 406, 407, 408, 409, 410, 411, 412, 413, 414, 415, 416, 417, 418, 419, 420, 421, 422, 423, 424, 425, 426, 427, 428, 429, 430, 431, 432, 433, 434, 435, 436, 437, 438, 439, 440, 441, 442, 443, 444, 445, 446, 447, 448, 449, 450, 451, 452, 453, 454, 455, 456, 457, 458, 459, 460, 461, 462, 463, 464, 465, 466, 467, 468, 469, 470, 471, 472, 473, 474, 475, 476, 477, 478, 479, 480, 481, 482, 483, 484, 485, 486, 487, 488, 489, 490, 491, 492, 493, 494, 495, 496, 497, 498, 499, or 500 nucleotides in length.

[0357] In some embodiments the 3′ flanking sequence is from 1-10 nucleotides in length, from 5-15 nucleotides in length, from 10-30 nucleotides in length, from 20-50 nucleotides in length, greater than 40 nucleotides in length, greater than 50 nucleotides in length, greater than 100 nucleotides in length or greater than 200 nucleotides in length.

[0358] In some embodiments, the 3′ flanking sequence may be 1, 2, 3, 4, 5, 6, 7, 8, 9, 10, 11, 12, 13, 14, 15, 16, 17, 18, 19, 20, 21, 22, 23, 24, 25, 26, 27, 28, 29, 30, 31, 32, 33, 34, 35, 36, 37, 38, 39, 40, 41, 42, 43, 44, 45, 46, 47, 48, 49, 50, 51, 52, 53, 54, 55, 56, 57, 58, 59, 60, 61, 62, 63, 64, 65, 66, 67, 68, 69, 70, 71, 72, 73, 74, 75, 76, 77, 78, 79, 80, 81, 82, 83, 84, 85, 86, 87, 88, 89, 90, 91, 92, 93, 94, 95, 96, 97, 98, 99, 100, 101, 102, 103, 104, 105, 106, 107, 108, 109, 110, 111, 112, 113, 114, 115, 116, 117, 118, 119, 120, 121, 122, 123, 124, 125, 126, 127, 128, 129, 130, 131, 132, 133, 134, 135, 136, 137, 138, 139, 140, 141, 142, 143, 144, 145, 146, 147, 148, 149, 150, 151, 152, 153, 154, 155, 156, 157, 158, 159, 160, 161, 162, 163, 164, 165, 166, 167, 168, 169, 170, 171, 172, 173, 174, 175, 176, 177, 178, 179, 180, 181, 182, 183, 184, 185, 186, 187, 188, 189, 190, 191, 192, 193, 194, 195, 196, 197, 198, 199, 200, 201, 202, 203, 204, 205, 206, 207, 208, 209, 210, 211, 212, 213, 214, 215, 216, 217, 218, 219, 220, 221, 222, 223, 224, 225, 226, 227, 228, 229, 230, 231, 232, 233, 234, 235, 236, 237, 238, 239, 240, 241, 242, 243, 244, 245, 246, 247, 248, 249, 250, 251, 252, 253, 254, 255, 256, 257, 258, 259, 260, 261, 262, 263, 264, 265, 266, 267, 268, 269, 270, 271, 272, 273, 274, 275, 276, 277, 278, 279, 280, 281, 282, 283, 284, 285, 286, 287, 288, 289, 290, 291, 292, 293, 294, 295, 296, 297, 298, 299, 300, 301, 302, 303, 304, 305, 306, 307, 308, 309, 310, 311, 312, 313, 314, 315, 316, 317, 318, 319, 320, 321, 322, 323, 324, 325, 326, 327, 328, 329, 330, 331, 332, 333, 334, 335, 336, 337, 338, 339, 340, 341, 342, 343, 344, 345, 346, 347, 348, 349, 350, 351, 352, 353, 354, 355, 356, 357, 358, 359, 360, 361, 362, 363, 364, 365, 366, 367, 368, 369, 370, 371, 372, 373, 374, 375, 376, 377, 378, 379, 380, 381, 382, 383, 384, 385, 386, 387, 388, 389, 390, 391, 392, 393, 394, 395, 396, 397, 398, 399, 400, 401, 402, 403, 404, 405, 406, 407, 408, 409, 410, 411, 412, 413, 414, 415, 416, 417, 418, 419, 420, 421, 422, 423, 424, 425, 426, 427, 428, 429, 430, 431, 432, 433, 434, 435, 436, 437, 438, 439, 440, 441, 442, 443, 444, 445, 446, 447, 448, 449, 450, 451, 452, 453, 454, 455, 456, 457, 458, 459, 460, 461, 462, 463, 464, 465, 466, 467, 468, 469, 470, 471, 472, 473, 474, 475, 476, 477, 478, 479, 480, 481, 482, 483, 484, 485, 486, 487, 488, 489, 490, 491, 492, 493, 494, 495, 496, 497, 498, 499, or 500 nucleotides in length.

[0359] In some embodiments, the 5′ and 3′ flanking sequences are the same sequence. In some embodiments they differ by 2%, 3%, 4%, 5%, 10%, 20% or more than 30% when aligned to each other.

[0360] In one embodiment, the molecular scaffold comprises at least one 3′ flanking region. As a non-limiting example, the 3′ flanking region may comprise a 3′ flanking sequence which may be of any length and may be derived in whole or in part from wild type microRNA sequence or be a completely artificial sequence.

[0361] Forming the stem of a stem loop structure is a minimum of at least one payload sequence. In some embodiments, the payload sequence comprises at least one nucleic acid sequence which is in part complementary or will hybridize to the target sequence. In some embodiments, the payload is an siRNA molecule or fragment of an siRNA molecule.

[0362] In some embodiments, the 5′ arm of the stem loop comprises a sense sequence.

[0363] In some embodiments, the 3′ arm of the stem loop comprises an antisense sequence. The antisense sequence, in some instances, comprises a “G” nucleotide at the 5′ most end.

[0364] In other embodiments, the sense sequence may reside on the 3′ arm while the antisense sequence resides on the 5′ arm of the stem of the stem loop structure.

[0365] The sense and antisense sequences may be completely complementary across a substantial portion of their length. In other embodiments, the sense sequence and antisense sequence may be at least 70, 80, 90, 95 or 99% complementary across independently at least 50, 60, 70, 80, 85, 90, 95, or 99% of the length of the strands.

[0366] Neither the identity of the sense sequence nor the homology of the antisense sequence need be 100% complementary to the target.

[0367] Separating the sense and antisense sequence of the stem loop structure is a loop (also known as a loop motif). The loop may be of any length, between 4-30 nucleotides, between 4-20 nucleotides, between 4-15 nucleotides, between 5-15 nucleotides, between 6-12 nucleotides, 6 nucleotides, 7, nucleotides, 8 nucleotides, 9 nucleotides, 10 nucleotides, I1 nucleotides, and/or 12 nucleotides.

[0368] In some embodiments, the loop comprises at least one UGUG motif. In some embodiments, the UGUG motif is located at the 5′ terminus of the loop.

[0369] Spacer regions may be present in the modulatory polynucleotide to separate one or more modules from one another. There may be one or more such spacer regions present.

[0370] In one embodiment, a spacer region of between 8-20, i.e., 8, 9, 10, 11, 12, 13, 14, 15, 16, 17, 18, 19, or 20 nucleotides may be present between the sense sequence and a flanking sequence.

[0371] In one embodiment, the spacer is 13 nucleotides and is located between the 5′ terminus of the sense sequence and a flanking sequence. In one embodiment, a spacer is of sufficient length to form approximately one helical turn of the sequence.

[0372] In one embodiment, a spacer region of between 8-20, i.e., 8, 9, 10, 11, 12, 13, 14, 15, 16, 17, 18, 19, or 20 nucleotides may be present between the antisense sequence and a flanking sequence.

[0373] In one embodiment, the spacer sequence is between 10-13, i.e., 10, 11, 12 or 13 nucleotides and is located between the 3′ terminus of the antisense sequence and a flanking sequence. In one embodiment, a spacer is of sufficient length to form approximately one helical turn of the sequence.

[0374] In one embodiment, the modulatory polynucleotide comprises in the 5′ to 3′ direction, a 5′ flanking sequence, a 5′ arm, a loop motif, a 3′ arm and a 3′ flanking sequence. As a non-limiting example, the 5′ arm may comprise a sense sequence and the 3′ arm comprises the antisense sequence. In another non-limiting example, the 5′ arm comprises the antisense sequence and the 3′ arm comprises the sense sequence.

[0375] In one embodiment, the 5′ arm, payload (e.g., sense and/or antisense sequence), loop motif and/or 3′ arm sequence may be altered (e.g., substituting 1 or more nucleotides, adding nucleotides and/or deleting nucleotides). The alteration may cause a beneficial change in the function of the construct (e.g., increase knock-down of the target sequence, reduce degradation of the construct, reduce off target effect, increase efficiency of the payload, and reduce degradation of the payload).

[0376] In one embodiment, the molecular scaffold of the modulatory polynucleotides is aligned in order to have the rate of excision of the guide strand be greater than the rate of excision of the passenger strand. The rate of excision of the guide or passenger strand may be, independently, 1%, 2%, 3%, 4%, 5%, 10%, 15/, 20%, 25%, 30%, 35%, 40%, 45%, 50%, 55%, 60%, 65%, 70%, 75%, 80%, 85%, 90%, 95%, 99% or more than 99%. As a non-limiting example, the rate of excision of the guide strand is at least 80%. As another non-limiting example, the rate of excision of the guide strand is at least 90%.

[0377] In one embodiment, the rate of excision of the guide strand is greater than the rate of excision of the passenger strand. In one aspect, the rate of excision of the guide strand may be at least 1%, 2%, 3%, 4%, 5%, 10%, 15%, 20%, 25%, 30%, 35%, 40%, 45%, 50%, 55%, 60%, 65%, 70%, 75%, 80%, 85%, 90%, 95%, 99% or more than 99% greater than the passenger strand.

[0378] In one embodiment, the efficiency of excision of the guide strand is at least 60%, 65%, 70%, 75%, 80%, 85%, 90%, 95%, 99% or more than 99%. As a non-limiting example, the efficiency of the excision of the guide strand is greater than 80%.

[0379] In one embodiment, the efficiency of the excision of the guide strand is greater than the excision of the passenger strand from the molecular scaffold. The excision of the guide strand may be 2, 3, 4, 5, 6, 7, 8, 9, 10 or more than 10 times more efficient than the excision of the passenger strand from the molecular scaffold.

[0380] In one embodiment, the molecular scaffold comprises a dual-function targeting modulatory polynucleotide. As used herein, a “dual-function targeting” modulatory polynucleotide is a polynucleotide where both the guide and passenger strands knock down the same target or the guide and passenger strands knock down different targets.

[0381] In one embodiment, the molecular scaffold of the modulatory polynucleotides described herein comprise a 5′ flanking region, a loop region and a 3′ flanking region. Non-limiting examples of the sequences for the 5′ flanking region, loop region and the 3′ flanking region which may be used in the molecular scaffolds described herein are shown in Tables 10-12.

TABLE 10
5′ Flanking Regions for Molecular Scaffold

| | | 5′ Flanking |
|---|---|---|
| 5′ Flanking | | Region SEQ |
| Region Name | 5′ Flanking Region Sequence | ID NO |
| 5F1 | UUUAUGCCUCAUCCUCUGAGUGCUGAAGGCUUGCUGUAGGCU | 1772 |
| | GUAUGCUG | |
| 5F2 | GUGCUGGGCGGGGGGCGGCGGGCCCUCCCGCAGAACACCAUG | 1773 |
| | CGCUCUUCGGAA | |
| 5F3 | GAAGCAAAGAAGGGGCAGAGGGAGCCCGUGAGCUGAGUGGGC | 1774 |
| | CAGGGACUGGGAGAAGGAGUGAGGAGGCAGGGCCGGCAUGCC | |
| | UCUGCUGGUGGCCAGA | |
| 5F4 | GUGCUGGGCGGGGGGCGGCGGGCCCUCCCGCAGAACACCAUG | 1775 |
| | CGCUCUUCGGGA | |
| 5F5 | GUGCUGGGCGGGGGGCGGCGGGCCCUCCCGCAGAACACCAUG | 1776 |
| | CGCUCCACGGAA | |
| 5F6 | GGGCCCUCCCGCAGAACACCAUGCGCUCCACGGAA | 1777 |
| 5F7 | CUCCCGCAGAACACCAUGCGCUCCACGGAA | 1778 |
| 5F8 | GUGCUGGGCGGGGGGCGGCGGGCCCUCCCGCAGAACACCAUG | 1779 |
| | CGCUCCACGGAAG | |
| 5F9 | GUGCUGGGCGGGGGGCGGCGGGCCCUCCCGCAGAACACCAUG | 1780 |
| | CGCUCCUCGGAA | |

TABLE 11
Loop Motif

| | | Loop Motif |
|---|---|---|
| Loop Motif | Loop Motif | Region SEQ |
| Region Name | Region Sequence | ID NO |
| L1 | UGUGACCUGG | 1781 |
| L2 | UGUGAUUUGG | 1782 |
| L3 | UAUAAUUUGG | 1783 |
| L4 | CCUGACCCAGU | 1784 |
| L5 | GUCUGCACCUGUCACUAG | 1785 |
| L6 | GUGACCCAAG | 1786 |
| L7 | GUGGCCACUGAGAAG | 1787 |
| L8 | GUGACCCAAU | 1788 |
| L9 | GUGACCCAAC | 1789 |

TABLE 12
3′ Flanking Regions for Molecular Scaffold

| | | 3′ Flanking |
|---|---|---|
| 3′ Flanking | | Region SEQ |
| Region Name | 3′ Flanking Region Sequence | ID NO |
| 3F1 | AGUGUAUGAUGCCUGUUACUAGCAUUCACAUGGAACAA | 1791 |
| | AUUGCUGCCGUG | |
| 3F2 | CUGAGGAGCGCCUUGACAGCAGCCAUGGGAGGGCCGCC | 1792 |
| | CCCUACCUCAGUGA | |
| 3F3 | CUGUGGAGCGCCUUGACAGCAGCCAUGGGAGGGCCGCC | 1793 |
| | CCCUACCUCAGUGA | |
| 3F4 | UGGCCGUGUAGUGCUACCCAGCGCUGGCUGCCUCCUCA | 1794 |
| | GCAUUGCAAUUCCUCUCCCAUCUGGGCACCAGUCAGCU | |
| | ACCCUGGUGGGAAUCUGGGUAGCC | |
| 3F5 | GGCCGUGUAGUGCUACCCAGCGCUGGCUGCCUCCUCAG | 1795 |
| | CAUUGCAAUUCCUCUCCCAUCUGGGCACCAGUCAGCUA | |
| | CCCUGGUGGGAAUCUGGGUAGCC | |
| 3F6 | UCCUGAGGAGCGCCUUGACAGCAGCCAUGGGAGGGCCG | 1796 |
| | CCCCCUACCUCAGUGA | |
| 3F7 | CUGAGGAGCGCCUUGACAGCAGCCAUGGGAGGGCC | 1797 |
| 3F8 | CUGCGGAGCGCCUUGACAGCAGCCAUGGGAGGGCCGCC | 1798 |
| | CCCUACCUCAGUGA | |

[0382] Any of the regions described in Tables 8-10 may be used in the molecular scaffolds described herein.

[0383] In one embodiment, the molecular scaffold may comprise one 5′flanking region listed in Table 10. As anon-limiting example, the molecular scaffold may comprise the 5′ flanking region 5F1, 5F2, 5F3, 5F4, 5F5, 5F6, 5F7, 5F8 or 5F9.

[0384] In one embodiment, the molecular scaffold may comprise one loop motif region listed in Table 11. As a non-limiting example, the molecular scaffold may comprise the loop motif region L, L2, L3, L4, L5, L6, L7, L8, L9, or L10.

[0385] In one embodiment, the molecular scaffold may comprise one 3′ flanking region listed in Table 12. As a non-limiting example, the molecular scaffold may comprise the 3′ flanking region 3F1, 3F2, 3F3, 3F4, 3F5, 3F6, 3F7 or 3F8.

[0386] In one embodiment, the molecular scaffold may comprise at least one 5′ flanking region and at least one loop motif region as described in Tables 10 and I1. As a non-limiting example, the molecular scaffold may comprise 5F1 and L1, 5F1 and L2, 5F1 and L3, 5F1 and L4, 5F1 and L5, 5F1 and L6, 5F1 and L7, 5F1 and L8, 5F1 and L9, 5F1 and L10, 5F2 and L1, 5F2 and L2, 5F2 and L3, 5F2 and L4, 5F2 and L5, 5F2 and L6, 5F2 and L, 5F2 and L8, 5F2 and L9, 5F2 and L10, 5F3 and L1, 5F3 and L2, 5F3 and L3, 5F3 and L4, 5F3 and L5, 5F3 and L6, 5F3 and L7, 5F3 and L8, 5F3 and L9, 5F3 and L10, 5F4 and L1, 5F4 and L2, 5F4 and L3, 5F4 and L4, 5F4 and L5, 5F4 and L6, 5F4 and L, 5F4 and L8S, 5F4 and L9, 5F4 and L10, 5F5 and L1, 5F5 and L2, 5F5 and L3, 5F5 and L4, 5F5 and L5, 5F5 and L6, 5F5 and L7, 5F5 and L8, 5F5 and L9, 5F5 and L10, 5F6 and L1, 5F6 and L2, 5F6 and L3, 5F6 and L4, 5F6 and L5, 5F6 and L6, 5F6 and L7, 5F6 and L8, 5F6 and L9, 5F6 and L10, 5F7 and L1, 5F7 and L2, 5F7 and L3, 5F7 and L4, 5F7 and L5, 5F7 and L6, 5F7 and L7, 5F7 and L8, 5F7 and L9, 5F7 and L10, 5F8 and L1, 5F8 and L2, 5F8 and L3, 5F8 and L4, 5F8 and L5, 5F8 and L6, 5F8 and L7, 5F8 and L8S, 5F8 and L9, 5F8 and L10, 5F9 and L1, 5F9 and L2, 5F9 and L3, 5F9 and L4, 5F9 and L5, 5F9 and L6, 5F9 and L, 5F9 and L8, 5F9 and L9, or 5F9 and L10.

[0387] In one embodiment, the molecular scaffold may comprise at least one 3′ flanking region and at least one loop motif region as described in Tables 11 and 12. As a non-limiting example, the molecular scaffold may comprise 3F1 and L1, 3F1 and L2, 3F1 and L3, 3F1 and L4, 3F1 and L5, 3F1 and L6, 3F1 and L7, 3F1 and L8, 3F1 and L9, 3F1 and L10, 3F2 and L1, 3F2 and L2, 3F2 and L3, 3F2 and L4, 3F2 and L5, 3F2 and L6, 3F2 and L, 3F2 and L8, 3F2 and L9, 3F2 and L10, 3F3 and L1, 3F3 and L2, 3F3 and L3, 3F3 and L4, 3F3 and L5, 3F3 and L6, 3F3 and L7, 3F3 and L8, 3F3 and L9, 3F3 and L10, 3F4 and L1, 3F4 and L2, 3F4 and L3, 3F4 and L4, 3F4 and L5, 3F4 and L6, 3F4 and L, 3F4 and L8, 3F4 and L9, 3F4 and L10, 3F5 and L1, 3F5 and L2, 3F5 and L3, 3F5 and L4, 3F5 and L5, 3F5 and L6, 3F5 and L7, 3F5 and L8, 3F5 and L9, 3F5 and L10, 3F6 and L1, 3F6 and L2, 3F6 and L3, 3F6 and L4, 3F6 and L5, 3F6 and L6, 3F6 and L, 3F6 and L8, 3F6 and L9, 3F6 and L10, 3F7 and L1, 3F7 and L2, 3F7 and L3, 3F7 and L4, 3F7 and L5, 3F7 and L6, 3F7 and L7, 3F7 and L8, 3F7 and L9, 3F7 and L10, 3F8 and L1, 3F8 and L2, 3F8 and L3, 3F8 and L4, 3F8 and L5, 3F8 and L6, 3F8 and L7, 3F8 and L8, 3F8 and L9, or 3F8 and L10.

[0388] In one embodiment, the molecular scaffold may comprise at least one 5′ flanking region and at least 3′ flanking region as described in Tables 10 and 12. As a non-limiting example, the molecular scaffold may comprise 5F1 and 3F1, 5F1 and 3F2, 5F1 and 3F3, 5F1 and 3F4, 5F1 and 3F5, 5F1 and 3F6, F1 and 3F7, 5F1 and 3F8, 5F2 and 3F1, 5F2 and 3F2, 5F2 and 3F3, 5F2 and 3F4, 5F2 and 3F5, 5F2 and 3F6, 5F2 and 3F7, 5F2 and 3F8, 5F3 and 3F1, 5F3 and 3F2, 5F3 and 3F3, 5F3 and 3F4, 5F3 and 3F5, 5F3 and 3F6, 5F3 and 3F7, 5F3 and 3F8, 5F4 and 3F1, 5F4 and 3F2, 5F4 and 3F3, 5F4 and 3F4, 5F4 and 3F5, 5F4 and 3F6, 5F4 and 3F7, 5F4 and 3F8, 5F5 and 3F1, 5F5 and 3F2, 5F5 and 3F3, 5F5 and 3F4, 5F5 and 3F5, 5F5 and 3F6, 5F5 and 3F7, 5F5 and 3F8, 5F6 and 3F1, 5F6 and 3F2, 5F6 and 3F3, 5F6 and 3F4, 5F6 and 3F5, 5F6 and 3F6, 5F6 and 3F7, 5F6 and 3F8, 5F7 and 3F1, 5F7 and 3F2, 5F7 and 3F3, 5F7 and 3F4, 5F7 and 3F5, 5F7 and 3F6, 5F7 and 3F7, 5F7 and 3F8, 5F8 and 3F1, 5F8 and 3F2, 5F8 and 3F3, 5F8 and 3F4, 5F8 and 3F5, 5F8 and 3F6, 5F8 and 3F7, 5F8 and 3F8, 5F9 and 3F1, 5F9 and 3F2, 5F9 and 3F3, 5F9 and 3F4, 5F9 and 3F5, 5F9 and 3F6, 5F9 and 3F7, or 5F9 and 3F8.

[0389] In one embodiment, the molecular scaffold may comprise at least one 5′ flanking region, at least one loop motif region and at least one 3′ flanking region as described in Tables 10-12. As a non-limiting example, the molecular scaffold may comprise 5F1, L1 and 3F1; 5F1, L1 and 3F2; 5F1, L1 and 3F3; 5F1, L1 and 3F4; 5F1, L1 and 3F5; 5F1, L1 and 3F6; 5F1, L1 and 3F7; 5F1, L1 and 3F8; 5F2, L1 and 3F1; 5F2, L1 and 3F2; 5F2, L1 and 3F3; 5F2, L1 and 3F4; 5F2, L1 and 3F5; 5F2, L1 and 3F6; 5F2, L1 and 3F7; 5F2, L1 and 3F8; 5F3, L1 and 3F1; 5F3, L1 and 3F2; 5F3, L1 and 3F3; 5F3, L1 and 3F4; 5F3, L1 and 3F5; 5F3, L1 and 3F6; 5F3, L1 and 3F7; 5F3, L1 and 3F8; 5F4, L1 and 3F1; 5F4, L1 and 3F2; 5F4, L1 and 3F3; 5F4, L1 and 3F4; 5F4, L1 and 3F5; 5F4, L1 and 3F6; 5F4, L1 and 3F7:5F4, L1 and 3F8; F5, L1 and 3F1; 5F5, L1 and 3F2; 5F5, L1 and 3F3; 5F5, L1 and 3F4; 5F5, L1 and 3F5; 5F5, L1 and 3F6; 5F5, L1 and 3F7; 5F5, L1 and 3F8; 5F6, L1 and 3F5; 5F6, L1 and 3F2; 5F6, L1 and 3F3; 5F6, L1 and 3F4; 5F6, L1 and 3F1; 5F6, L1 and 3F6; 5F6, L1 and 3F7; 5F6, L1 and 3F8; 5F7, L1 and 3F5; 5F7, L1 and 3F2; 5F7, L1 and 3F3; 5F7, L1 and 3F4; 5F7, L1 and 3F5; 5F7, L1 and 3F6; 5F7, L1 and 3F7; 5F7, L and 3F8; 5F8, L1 and 3F1; 5F8, L1 and 3F2; 5F8, L1 and 3F3; 5F8, L1 and 3F4; 5F8, L1 and 3F5; 5F8, L1 and 3F6; 5F8, L1 and 3F7; 5F8, L1 and 3F8; 5F9, L1 and 3F1; 5F9, L1 and 3F2; 5F9, L1 and 3F3; 5F9, L1 and 3F4; 5F9, L1 and 3F5; 5F9, L1 and 3F6; 5F9, L1 and 3F7; 5F9, L1 and 3F8; 5F1, L2 and 3F1; 5F1, L2 and 3F2; 5F1, L2 and 3F3; 5F1, L2 and 3F4; 5F1, L2 and 3F5; 5F1, L2 and 3F6; 5F1, L2 and 3F7; 5F1, L2 and 3F8; 5F2, L2 and 3F1; 5F2, L2 and 3F2; 5F2, L2 and 3F3; 5F2, L2 and 3F4; 5F2, L2 and 3F5; 5F2, L2 and 3F6; 5F2, L2 and 3F7; 5F2, L2 and 3F8; 5F3, L2 and 3F1; 5F3, L2 and 3F2; 5F3, L2 and 3F3; 5F3, L2 and 3F4; F3, L2 and 3F5; 5F3, L2 and 3F6; 5F3, L2 and 3F7; 5F3, L2 and 3F8; 5F4, L2 and 3F1; 5F4, L2 and 3F2; 5F4, L2 and 3F3; 5F4, L2 and 3F4; 5F4, L2 and 3F5; 5F4, L2 and 3F6; 5F4, L2 and 3F7; 5F4, L2 and 3F8; 5F5, L2 and 3F1; 5F5, L2 and 3F2; 5F5, L2 and 3F3; 5F5, L2 and 3F4; 5F5, L2 and 3F5; 5F5, L2 and 3F6; 5F5, L2 and 3F7; 5F5, L2 and 3F8; 5F6, L2 and 3F1; 5F6, L2 and 3F2; 5F6, L2 and 3F3; 5F6, L2 and 3F4; 5F6, L2 and 3F5; 5F6, L2 and 3F6; 5F6, L2 and 3F7; 5F6, L2 and 3F8; 5F7, L2 and 3F1; 5F7, L2 and 3F2; 5F7, L2 and 3F3; 5F7, L2 and 3F4; 5F7, L2 and 3F5; 5F7, L2 and 3F6; 5F7, L2 and 3F7; 5F7, L2 and 3F8; 5F8, L2 and 3F1; 5F8, L2 and 3F2; 5F8, L2 and 3F3; 5F8, L2 and 3F4; 5F8, L2 and 3F5; 5F8, L2 and 3F6; 5F8, L2 and 3F7; 5F8, L2 and 3F8; 5F9, L2 and 3F1; 5F9, L2 and 3F2; 5F9, L2 and 3F3; 5F9, L2 and 3F4; 5F9, L2 and 3F5; 5F9, L2 and 3F6; 5F9, L2 and 3F7; 5F9, L2 and 3F8; 5F1, L3 and 3F1, 5F1, L3 and 3F2; 5F1, L3 and 3F3; 5F1, L3 and 3F4; 5F1, L3 and 3F5; 5F1, L3 and 3F6; 5F1, L3 and 3F7; 5F1, L3 and 3F8; 5F2, L3 and 3F5; 5F2, L3 and 3F2; 5F2, L3 and 3F3; 5F2, L3 and 3F4; 5F2, L3 and 3F5; 5F2, L3 and 3F6; 5F2, L3 and 3F7; 5F2, L3 and 3F8; 5F3, L3 and 3F1; 5F3, L3 and 3F2; 5F3, L3 and 3F3; 5F3, L3 and 3F4; 5F3, L3 and 3F5; 5F3, L3 and 3F6; 5F3, L3 and 3F7; 5F3, L3 and 3F8; 5F4, L3 and 3F1; 5F4, L3 and 3F2; 5F4, L3 and 3F3; 5F4, L3 and 3F4; 5F4, L3 and 3F5; 5F4, L3 and 3F6; 5F4, L3 and 3F7; 5F4, L3 and 3F8; 5F5, L3 and 3F1; 5F5, L3 and 3F2; 5F5, L3 and 3F3; 5F5, L3 and 3F4; 5F5, L3 and 3F5; 5F5, L3 and 3F6; 5F5, L3 and 3F7; 5F5, L3 and 3F8; 5F6, L3 and 3F1; 5F6, L3 and 3F2; 5F6, L3 and 3F3; 5F6, L3 and 3F4; 5F6, L3 and 3F5; 5 F6, L3 and 3F6; 5F6, L3 and 3F7; 5F6, L3 and 3F8; 5F7, L3 and 3F1; 5F7, L3 and 3F2; 5F7, L3 and 3F3; 5F7, L3 and 3F4; 5F7, L3 and 3F5; 5F7, L3 and 3F6; 5F7, L3 and 3F7; 5F7, L3 and 3F8; 5F8, L3 and 3F1; 5F8, L3 and 3F2; 5F8, L3 and 3F3; 5F8, L3 and 3F4; 5F8, L3 and 3F5; 5F8, L3 and 3F6; 5F8, L3 and 3F7; 5F8, L3 and 3F8; 5F9, L3 and 3F1; 5F9, L3 and 3F2; 5F9, L3 and 3F3; 5F9, L3 and 3F4; 5F9, L3 and 3F5; 5F9, L3 and 3F6; 5F9, L3 and 3F7; 5F9, L3 and 3F8; 5F1, L4 and 3F1; 5F1, L4 and 3F2; 5F1, L4 and 3F3; 5F1, L4 and 3F4; 5F1, L4 and 3F5; 5F1, L4 and 3F6; 5F1, L4 and 3F7; 5F1, L4 and 3F8; 5F2, L4 and 3F1; 5F2, L4 and 3F2; 5F2, L4 and 3F3; 5F2, L4 and 3F4; 5F2, L4 and 3F5; 5F2, L4 and 3F6; 5F2, L4 and 3F7; 5F2, L4 and 3F8; 5F3, L4 and 3F1; 5F3, L4 and 3F2; 5F3, L4 and 3F3; 5F3, L4 and 3F4; 5F3, L4 and 3F5; 5F3, L4 and 3F6; 5F3, L4 and 3F7; 5F3, L4 and 3F8; 5F4, L4 and 3F1; 5F4, L4 and 3F2; 5F4, L4 and 3F3; 5F4, L4 and 3F4; 5F4, L4 and 3F5; 5F4, L4 and 3F6; 5F4, L4 and 3F7; 5F4, L4 and 3F8; 5F5, L4 and 3F1; 5F5, L4 and 3F2; 5F5, L4 and 3F3; 5F5, L4 and 3F4; 5F5, L4 and 3F5; 5F5, L4 and 3F6; 5F5, L4 and 3F7; 5F5, L4 and 3F8; 5F6, L4 and 3F1; 5F6, L4 and 3F2; 5F6, L4 and 3F3; 5F6, L4 and 3F4; 5F6, L4 and 3F5; 5F6, L4 and 3F6; 5F6, L4 and 3F7; 5F6, L4 and 3F8; 5F7, L4 and 3F1; 5F7, L4 and 3F2; 5F7, L4 and 3F3; 5F7, L4 and 3F4; 5F7, L4 and 3F5; 5F7, L4 and 3F6; 5F7, L4 and 3F7; 5F7, L4 and 3F8; 5F8, L4 and 3F1; 5F8, L4 and 3F2; 5F8, L4 and 3F3; 5F8, L4 and 3F4; 5F8, L4 and 3F5; 5F8, L4 and 3F6; 5F8, L4 and 3F7; 5F8, L4 and 3F8; 5F9, L4 and 3F1; 5F9, L4 and 3F2; 5F9, L4 and 3F3; 5F9, L4 and 3F4; 5F9, L4 and 3F5; 5F9, L4 and 3F6; 5F9, L4 and 3F7; 5F9, L4 and 3F8; 5F1, L5 and 3F1; 5F1, L5 and 3F2; 5F1, L5 and 3F3; 5F1, L5 and 3F4; 5F1, L5 and 3F5; 5F1, L5 and 3F6; 5F1, L5 and 3F7; 5F1, L5 and 3F8; 5F2, L5 and 3F1; 5F2, L5 and 3F2; 5F2, L5 and 3F3; 5F2, L5 and 3F4; 5F2, L5 and 3F5; 5F2, L5 and 3F6; 5F2, L5 and 3F7; 5F2, L5 and 3F8; 5F3, L5 and 3F1; 5F3, L5 and 3F2; 5F3, L5 and 3F3; 5F3, L5 and 3F4; 5F3, L5 and 3F5; 5F3, L5 and 3F6; 5F3, L5 and 3F7; 5F3, L5 and 3F8; 5F4, L5 and 3F1; 5F4, L5 and 3F2; 5F4, L5 and 3F3; 5F4, L5 and 3F4; 5F4, L5 and 3F5; 5F4, L5 and 3F6; 5F4, L5 and 3F7; 5F4, L5 and 3F8; 5F5, L5 and 3F1; 5F5, L5 and 3F2; 5F5, L5 and 3F3; 5F5, L5 and 3F4; 5F5, L5 and 3F5; 5F5, L5 and 3F6; 5F5, L5 and 3F7; 5F5, L5 and 3F8; 5F6, L5 and 3F1; 5F6, L5 and 3F2; 5F6, L5 and 3F3; 5F6, L5 and 3F4; 5F6, L5 and 3F5; 5F6, L5 and 3F6; 5F6, L5 and 3F7; 5F6, L5 and 3F8; 5F7, L5 and 3F1; 5F7, L5 and 3F2; 5F7, L5 and 3F3; 5F7, L5 and 3F4; 5F7, L5 and 3F5; 5F7, L5 and 3F6; 5F7, L5 and 3F7; 5F7, L5 and 3F8; 5F8, L5 and 3F1; 5F8, L5 and 3F2; 5F8, L5 and 3F3; 5F8, L5 and 3F4; 5F8, L5 and 3F5; 5F8, L5 and 3F6; 5F8, L5 and 3F7; 5F8, L5 and 3F8; 5F9, L5 and 3F1; 5F9, L5 and 3F2; 5F9, L5 and 3F3; 5F9, L5 and 3F4; 5F9, L5 and 3F5; 5F9, L5 and 3F6; 5F9, L5 and 3F7; or 5F9, L5 and 3F8.

[0390] In one embodiment, the molecular scaffold may comprise one or more linkers known in the art. The linkers may separate regions or one molecular scaffold from another. As a non-limiting example, the molecular scaffold may be polycistronic.

[0391] In one embodiment, the modulatory polynucleotide is designed using at least one of the following properties: loop variant, seed mismatch/bulge/wobble variant, stem mismatch, loop variant and basal stem mismatch variant, seed mismatch and basal stem mismatch variant, stem mismatch and basal stem mismatch variant, seed wobble and basal stem wobble variant, or a stem sequence variant.

Introduction into Cells

[0392] siRNA molecules may be delivered to target cells for targeting the gene of interest inside the target cells. In some embodiments, the cells may include, but are not limited to, cells of mammalian origin, cells of human origins, embryonic stem cells, induced pluripotent stem cells, neural stem cells, neural progenitor cells and differentiated neural cells.

[0393] In some embodiments, the siRNA molecules (e.g., siRNA duplexes) may be introduced into target cells using viral vehicles such as AAV particles. These AAV particles are engineered and optimized to facilitate the entry of siRNA molecule into cells that are not readily amendable to transfection. Also, some synthetic viral vectors possess an ability to integrate the shRNA into the cell genome, thereby leading to stable siRNA expression and long-term knockdown of a target gene, e.g., an astrocyte or neuron. In this manner, viral vectors are engineered as vehicles for specific delivery while lacking the deleterious replication and/or integration features found in wild-type virus.

[0394] In some embodiments, the siRNA molecules targeting a gene of interest are introduced into a cell by contacting the cell with a composition comprising a lipophilic carrier and an AAV particle comprising a nucleic acid sequence encoding the siRNA molecules. In other embodiments, the siRNA molecule is introduced into a cell by transfecting or infecting the cell with an AAV particle comprising nucleic acid sequences capable of producing the siRNA molecule when transcribed in the cell. In some embodiments, the siRNA molecule is introduced into a cell by injecting into the cell an AAV particle comprising a nucleic acid sequence capable of producing the siRNA molecule when transcribed in the cell.

[0395] In some embodiments, an AAV particle comprising a nucleic acid sequence encoding the siRNA molecules may be transduced into cells.

[0396] In other embodiments, the AAV particles comprising the nucleic acid sequence encoding the siRNA molecules may be delivered into cells by electroporation (e.g. U.S. Patent Application Publication No. 20050014264; the contents of which are herein incorporated by reference in their entirety).

[0397] Other methods for introducing AAV particles comprising the nucleic acid sequence for the siRNA molecules described herein may include photochemical internalization as described in U. S. Patent Application Publication No. 20120264807; the contents of which are herein incorporated by reference in their entirety.

[0398] In one embodiment, the AAV particles from any relevant species, such as, but not limited to, human, dog, mouse, rat or monkey may be introduced into cells.

[0399] In one embodiment, the AAV particles may be introduced into cells which are relevant to the disease to be treated. As a non-limiting example, the disease is a tauopathy and/or Alzheimer's Disease and the target cells are entorhinal cortex, hippocampal or cortical neurons.

[0400] In one embodiment, the AAV particles may be introduced into cells which have a high level of endogenous expression of the target sequence.

[0401] In another embodiment, the AAV particles may be introduced into cells which have a low level of endogenous expression of the target sequence.

[0402] In one embodiment, the cells may be those which have a high efficiency of AAV transduction.

[0403] In other embodiments, the AAV particles comprising a nucleic acid sequence encoding the siRNA molecules may be used to deliver siRNA molecules to the central nervous system (e.g., U.S. Pat. No. 6,180,613; the contents of which are herein incorporated by reference in their entirety).

[0404] In some aspects, the AAV particles comprising a nucleic acid sequence encoding the siRNA molecules may further comprise a modified capsid including peptides from non-viral origin. In other aspects, the AAV particle may contain a CNS specific (e.g., tropism for CNS or CNS tissues) chimeric capsid to facilitate the delivery of encoded siRNA duplexes into the brain and the spinal cord. For example, an alignment of cap nucleotide sequences from AAV variants exhibiting CNS tropism may be constructed to identify variable region (VR) sequence and structure.

[0405] In one embodiment, the AAV particles comprising a nucleic acid sequence encoding the siRNA molecules may encode siRNA molecules which are polycistronic molecules. The siRNA molecules may additionally comprise one or more linkers between regions of the siRNA molecules.

[0406] In one embodiment, an AAV particle may comprise at least one of the modulatory polynucleotides encoding at least one of the siRNA sequences or duplexes described herein.

[0407] In one embodiment, an expression vector or viral genome may comprise, from ITR to ITR recited 5′ to 3′, an ITR, a promoter, an intron, a modulatory polynucleotide, a polyA sequence and an ITR.

[0408] In one embodiment, the encoded siRNA molecule may be located downstream of a promoter in an expression vector such as, but not limited to, CMV, U6, H1, CBA or a CBA promoter with a SV40 intron. Further, the encoded siRNA molecule may also be located upstream of the polyadenylation sequence in an expression vector. As a non-limiting example, the encoded siRNA molecule may be located within 1, 2, 3, 4, 5, 6, 7, 8, 9, 10, 11, 12, 13, 14, 15, 16, 17, 18, 19, 20, 21, 22, 23, 24, 25, 26, 27, 28, 29, 30 or more than 30 nucleotides downstream from the promoter and/or upstream of the polyadenylation sequence in an expression vector. As another non-limiting example, the encoded siRNA molecule may be located within 1-5, 1-10, 1-15, 1-20, 1-25, 1-30, 5-10, 5-15, 5-20, 5-25, 5-30, 10-15, 10-20, 10-25, 10-30, 15-20, 15-25, 15-30, 20-25, 20-30 or 25-30 nucleotides downstream from the promoter and/or upstream of the polyadenylation sequence in an expression vector. As a non-limiting example, the encoded siRNA molecule may be located within the first 1%, 2%, 3%, 4%, 5%, 6%, 7%, 8%, 9%, 10%, 15%, 20%, 25% or more than 25% of the nucleotides downstream from the promoter and/or upstream of the polyadenylation sequence in an expression vector. As another non-limiting example, the encoded siRNA molecule may be located with the first 1-5%, 1-10%, 1-15%, 1-20%, 1-25%, 5-10%, 5-15%, 5-20%, 5-25%, 10-15%, 10-20%, 10-25%, 15-20%, 15-25%, or 20-25% downstream from the promoter and/or upstream of the polyadenylation sequence in an expression vector.

[0409] In one embodiment, the encoded siRNA molecule may be located upstream of the polyadenylation sequence in an expression vector. Further, the encoded siRNA molecule may be located downstream of a promoter such as, but not limited to, CMV, U6, CBA or a CBA promoter with a SV40 intron in an expression vector. As a non-limiting example, the encoded siRNA molecule may be located within 1, 2, 3, 4, 5, 6, 7, 8, 9, 10, 11, 12, 13, 14, 15, 16, 17, 18, 19, 20, 21, 22, 23, 24, 25, 26, 27, 28, 29, 30 or more than 30 nucleotides downstream from the promoter and/or upstream of the polyadenylation sequence in an expression vector. As another non-limiting example, the encoded siRNA molecule may be located within 1-5, 1-10, 1-15, 1-20, 1-25, 1-30, 5-10, 5-15, 5-20, 5-25, 5-30, 10-15, 10-20, 10-25, 10-30, 15-20, 15-25, 15-30, 20-25, 20-30 or 25-30 nucleotides downstream from the promoter and/or upstream of the polyadenylation sequence in an expression vector, As a non-limiting example, the encoded siRNA molecule may be located within the first 1%, 2%, 3%, 4%, 5%, 6%, 7%, 8%, 9%, 10%, 15%, 20%, 25% or more than 25% of the nucleotides downstream from the promoter and/or upstream of the polyadenylation sequence in an expression vector. As another non-limiting example, the encoded siRNA molecule may be located with the first 1-5%, 1-10%, 1-15%, 1-20%, 1-25%, 5-10%, 5-15%, 5-20%, 5-25%, 10-15%, 10-20%, 10-25%, 15-20%, 15-25%, or 20-25% downstream from the promoter and/or upstream of the polyadenylation sequence in an expression vector.

[0410] In one embodiment, the encoded siRNA molecule may be located in a scAAV.

[0411] In one embodiment, the encoded siRNA molecule may be located in an ssAAV.

[0412] In one embodiment, the encoded siRNA molecule may be located near the 5′ end of the flip ITR in an expression vector. In another embodiment, the encoded siRNA molecule may be located near the 3′ end of the flip ITR in an expression vector. In yet another embodiment, the encoded siRNA molecule may be located near the 5′ end of the flop ITR in an expression vector. In yet another embodiment, the encoded siRNA molecule may be located near the 3′ end of the flop ITR in an expression vector. In one embodiment, the encoded siRNA molecule may be located between the 5′ end of the flip ITR and the 3′ end of the flop ITR in an expression vector. In one embodiment, the encoded siRNA molecule may be located between (e.g., half-way between the 5′ end of the flip ITR and 3′ end of the flop ITR or the 3′ end of the flop ITR and the 5′ end of the flip ITR), the 3′ end of the flip ITR and the 5′ end of the flip ITR in an expression vector. As a non-limiting example, the encoded siRNA molecule may be located within 1, 2, 3, 4, 5, 6, 7, 8, 9, 10, 11, 12, 13, 14, 15, 16, 17, 18, 19, 20, 21, 22, 23, 24, 25, 26, 27, 28, 29, 30 or more than 30 nucleotides downstream from the 5′ or 3′ end of an ITR (e.g., Flip or Flop ITR) in an expression vector. As a non-limiting example, the encoded siRNA molecule may be located within 1, 2, 3, 4, 5, 6, 7, 8, 9, 10, 11, 12, 13, 14, 15, 16, 17, 18, 19, 20, 21, 22, 23, 24, 25, 26, 27, 28, 29, 30 or more than 30 nucleotides upstream from the 5′ or 3′ end of an ITR (e.g., Flip or Flop ITR) in an expression vector. As another non-limiting example, the encoded siRNA molecule may be located within 1-5, 1-10, 1-15, 1-20, 1-25, 1-30, 5-10, 5-15, 5-20, 5-25, 5-30, 10-15, 10-20, 10-25, 10-30, 15-20, 15-25, 15-30, 20-25, 20-30 or 25-30 nucleotides downstream from the 5′ or 3′ end of an ITR (e.g., Flip or Flop ITR) in an expression vector. As another non-limiting example, the encoded siRNA molecule may be located within 1-5, 1-10, 1-15, 1-20, 1-25, 1-30, 5-10, 5-15, 5-20, 5-25, 5-30, 10-15, 10-20, 10-25, 10-30, 15-20, 15-25, 15-30, 20-25, 20-30 or 25-30 upstream from the 5′ or 3′ end of an ITR (e.g., Flip or Flop ITR) in an expression vector. As a non-limiting example, the encoded siRNA molecule may be located within the first 1%, 2%, 3%, 4%, 5%, 6%, 7%, 8%, 9%, 10%, 15%, 20%, 25% or more than 25% of the nucleotides upstream from the 5′ or 3′ end of an ITR (e.g., Flip or Flop ITR) in an expression vector. As another non-limiting example, the encoded siRNA molecule may be located with the first 1-5%, 1-10%, 1-15%, 1-20%, 1-25%, 5-10%, 5-15%, 5-20%, 5-25%, 10-15%, 10-20%, 10-25%, 15-20%, 15-25%, or 20-25% downstream from the 5′ or 3′ end of an ITR (e.g., Flip or Flop ITR) in an expression vector.

[0413] In one embodiment, AAV particle comprising the nucleic acid sequence for the siRNA molecules described herein may be formulated for CNS delivery. Agents that cross the brain blood barrier may be used. Capsids engineered for efficient crossing of the blood brain barrier may be used. Non-limiting examples of such capsids or peptide inserts include VOY101, VOY201, VOY801, VOY1101, AAVPHP.N, AAVPHP.A, AAVPHP.B, PHP.B2, PHP.B3, G2A3, G2B4, G2B5, PHP.S, and variants thereof. For example, some cell penetrating peptides that can target siRNA molecules to the brain blood barrier endothelium may be used to formulate the siRNA duplexes targeting the gene of interest.

[0414] In one embodiment, AAV particle comprising the nucleic acid sequence for the payloads of interest (e.g., Frataxin, APOE, Tau) described herein may be formulated for CNS delivery. Agents that cross the brain blood barrier may be used. Capsids engineered for efficient crossing of the blood brain barrier may be used. Non-limiting examples of such capsids or peptide inserts include VOY101, VOY201, VOY801, VOY101, AAVPHP.N, AAVPHP.A, AAVPHP.B, PHP.B2, PHP.B3, G2A3, G2B4, G2B5, PHP.S, and variants thereof. For example, some cell penetrating peptides that deliver the payload to the brain blood barrier endothelium may be used to formulate the payload of the gene of interest.

[0415] In one embodiment, the AAV particle comprising a nucleic acid sequence encoding the siRNA molecules may be administered directly to the CNS. As a non-limiting example, the vector comprises a nucleic acid sequence encoding the siRNA molecules targeting ApoE2. As a non-limiting example, the vector comprises a nucleic acid sequence encoding the siRNA molecules targeting ApoE3. As a non-limiting example, the vector comprises a nucleic acid sequence encoding the siRNA molecules targeting ApoE4. As a non-limiting example, the vector comprises a nucleic acid sequence encoding the siRNA molecules targeting SOD1. As a non-limiting example, the vector comprises a nucleic acid sequence encoding the siRNA molecules targeting HTT. As a non-limiting example, the vector comprises a nucleic acid sequence encoding the siRNA molecules targeting Tau.

[0416] In specific embodiments, compositions of AAV particles comprising a nucleic acid sequence encoding the siRNA molecules of the present disclosure may be administered in a way which facilitates the vectors or siRNA molecule to enter the central nervous system and penetrate into CNS tissues and/or cells.

[0417] In one embodiment, the AAV particle may be administered to a subject (e.g., to the CNS of a subject via intrathecal administration) in a therapeutically effective amount for the siRNA duplexes or dsRNA to target the motor neurons and astrocytes in the spinal cord and/or brain stem. As a non-limiting example, the siRNA duplexes or dsRNA may reduce the expression of a target protein or mRNA. As another non-limiting example, the siRNA duplexes or dsRNA can suppress a target gene or protein and reduce target gene or protein mediated toxicity. The reduction of target protein and/or mRNA as well as target gene and/or protein mediated toxicity may be accomplished with almost no enhanced inflammation.

### II. FORMULATION AND DELIVERY

### Pharmaceutical Compositions

[0418] According to the present disclosure the AAV particles may be prepared as pharmaceutical compositions. It will be understood that such compositions necessarily comprise one or more active ingredients and, most often, a pharmaceutically acceptable excipient.

[0419] Relative amounts of the active ingredient (e.g. AAV particle), a pharmaceutically acceptable excipient, and/or any additional ingredients in a pharmaceutical composition in accordance with the present disclosure may vary, depending upon the identity, size, and/or condition of the subject being treated and further depending upon the route by which the composition is to be administered. For example, the composition may comprise between 0.1% and 99% (w/w) of the active ingredient. By way of example, the composition may comprise between 0.1% and 100%, e.g., between 0.5 and 50%, between 1-30%, between 5-80%, at least 80% (w/w) active ingredient.

[0420] In some embodiments, the AAV particle pharmaceutical compositions described herein may comprise at least one payload. As a non-limiting example, the pharmaceutical compositions may contain an AAV particle with 1, 2, 3, 4 or 5 payloads.

[0421] Although the descriptions of pharmaceutical compositions provided herein are principally directed to pharmaceutical compositions which are suitable for administration to humans, it will be understood by the skilled artisan that such compositions are generally suitable for administration to any other animal, e.g., to non-human animals, e.g. non-human mammals. Modification of pharmaceutical compositions suitable for administration to humans in order to render the compositions suitable for administration to various animals is well understood, and the ordinarily skilled veterinary pharmacologist can design and/or perform such modification with merely ordinary, if any, experimentation. Subjects to which administration of the pharmaceutical compositions is contemplated include, but are not limited to, humans and/or other primates mammals, including commercially relevant mammals such as cattle, pigs, horses, sheep, cats, dogs, mice, rats, birds, including commercially relevant birds such as poultry, chickens, ducks, geese, and/or turkeys.

[0422] In some embodiments, compositions are administered to humans, human patients, or subjects.

### Formulations

[0423] Formulations of the present disclosure can include, without limitation, saline, liposomes, lipid nanoparticles, polymers, peptides, proteins, cells transfected with viral vectors (e.g., for transfer or transplantation into a subject) and combinations thereof.

[0424] Formulations of the pharmaceutical compositions described herein may be prepared by any method known or hereafter developed in the art of pharmacology. As used herein the term “pharmaceutical composition” refers to compositions comprising at least one active ingredient and optionally one or more pharmaceutically acceptable excipients.

[0425] In general, such preparatory methods include the step of associating the active ingredient with an excipient and/or one or more other accessory ingredients. As used herein, the phrase “active ingredient” generally refers either to an AAV particle carrying a payload region encoding the polypeptides described herein or to the end product encoded by a viral genome of an AAV particle as described herein.

[0426] Formulations of the AAV particles and pharmaceutical compositions described herein may be prepared by any method known or hereafter developed in the art of pharmacology. In general, such preparatory methods include the step of bringing the active ingredient into association with an excipient and/or one or more other accessory ingredients, and then, if necessary and/or desirable, dividing, shaping and/or packaging the product into a desired single- or multi-dose unit.

[0427] A pharmaceutical composition in accordance with the present disclosure may be prepared, packaged, and/or sold in bulk, as a single unit dose, and/or as a plurality of single unit doses. As used herein, a “unit dose” refers to a discrete amount of the pharmaceutical composition comprising a predetermined amount of the active ingredient. The amount of the active ingredient is generally equal to the dosage of the active ingredient which would be administered to a subject and/or a convenient fraction of such a dosage such as, for example, one-half or one-third of such a dosage.

[0428] In one embodiment, the AAV particles described herein may be formulated in PBS with 0.001% of Pluronic acid (F-68) at a pH of about 7.0.

[0429] In some embodiments, the AAV formulations described herein may contain sufficient AAV particles for expression of at least one expressed functional payload. As a non-limiting example, the AAV particles may contain viral genomes encoding 1, 2, 3, 4 or 5 functional payloads.

[0430] In some embodiments, the formulations described herein may contain at least one AAV particle comprising the nucleic acid sequence encoding a protein of interest. The protein of interest may include but are not limited to an antibody, Aromatic L-Amino Acid Decarboxylase (AADC), ApoE2. Frataxin, survival motor neuron (SMN) protein, glucocerebrosidase. N-sulfoglucosamine sulfohydrolase, N-acetyl-alpha-glucosaminidase, iduronate 2-sulfatase, alpha-L-iduronidase, palmitoyl-protein thioesterase 1, tripeptidyl peptidase 1, battenin, CLN5, CLN6 (linclin), MFSD8, CLN8, aspartoacylase (ASPA), progranulin (GRN), MeCP2, beta-galactosidase (GLB1), and gigaxonin (GAN).

[0431] In some embodiments, the formulations described herein may contain at least one AAV particle comprising the nucleic acid sequence encoding the siRNA molecules described herein. In one embodiment, the siRNA molecules may target gene of interest at one target site. In another embodiment, the formulation comprises a plurality of AAV particles, each AAV particle comprising a nucleic acid sequence encoding a siRNA molecule targeting the gene of interest at different target site. The target gene may be targeted at 2, 3, 4, 5 or more than 5 sites. In one embodiment, the target gene may include but is not limited to are superoxide dismutase 1 (SOD1), chromosome 9 open reading frame 72 (C90RF72), TAR DNA binding protein (TARDBP), ataxin-3 (ATXN3), huntingtin (HTT), amyloid precursor protein (APP), apolipoprotein E (ApoE), microtubule-associated protein tau (MAPT), alpha-synuclein (SNCA), voltage-gated sodium channel alpha subunit 9 (SCN9A), voltage-gated sodium channel alpha subunit 10 (SCN10A) and/or McCP2.

[0432] According to the present disclosure AAV particles may be formulated for CNS delivery. Agents that cross the brain blood barrier may be used. For example, some cell penetrating peptides that can target molecules to the brain blood barrier endothelium may be used for formulation (e.g., Mathupala, Expert Opin Ther Pat., 2009, 19, 137-140; the contents of which are incorporated herein by reference in their entirety).

### Excipients and Diluents

[0433] The AAV particles described herein can be formulated using one or more excipients or diluents to (1) increase stability; (2) increase cell transfection or transduction; (3) permit the sustained or delayed release of the payload; (4) alter the biodistribution (e.g., target the viral particle to specific tissues or cell types); (5) increase the translation of encoded protein; (6) alter the release profile of encoded protein and/or (7) allow for regulatable expression of the payload.

[0434] In some embodiments, a pharmaceutically acceptable excipient may be at least 95%, at least 96%, at least 97%, at least 98%, at least 99%, or 100% pure. In some embodiments, an excipient is approved for use for humans and for veterinary use. In some embodiments, an excipient may be approved by United States Food and Drug Administration. In some embodiments, an excipient may be of pharmaceutical grade. In some embodiments, an excipient may meet the standards of the United States Pharmacopoeia (USP), the European Pharmacopoeia (EP), the British Pharmacopoeia, and/or the International Pharmacopoeia.

[0435] Excipients, as used herein, include, but are not limited to, any and all solvents, dispersion media, diluents, or other liquid vehicles, dispersion or suspension aids, surface active agents, isotonic agents, thickening or emulsifying agents, preservatives, and the like, as suited to the particular dosage form desired. Various excipients for formulating pharmaceutical compositions and techniques for preparing the composition are known in the art (see Remington: The Science and Practice of Pharmacy, 21st Edition, A. R. Gennaro, Lippincott, Williams & Wilkins. Baltimore, Md., 2006; incorporated herein by reference in its entirety). The use of a conventional excipient medium may be contemplated within the scope of the present disclosure, except insofar as any conventional excipient medium may be incompatible with a substance or its derivatives, such as by producing any undesirable biological effect or otherwise interacting in a deleterious manner with any other component(s) of the pharmaceutical composition.

[0436] Exemplary diluents include, but are not limited to, calcium carbonate, sodium carbonate, calcium phosphate, dicalcium phosphate, calcium sulfate, calcium hydrogen phosphate, sodium phosphate lactose, sucrose, cellulose, microcrystalline cellulose, kaolin, mannitol, sorbitol, inositol, sodium chloride, dry starch, cornstarch, powdered sugar, etc., and/or combinations thereof.

### Inactive Ingredients

[0437] In some embodiments. AAV particle formulations may comprise at least one inactive ingredient. As used herein, the term “inactive ingredient” refers to one or more agents that do not contribute to the activity of the active ingredient of the pharmaceutical composition included in formulations. In some embodiments, all, none or some of the inactive ingredients which may be used in the formulations of the present disclosure may be approved by the US Food and Drug Administration (FDA).

[0438] In one embodiment, the AAV particle pharmaceutical compositions comprise at least one inactive ingredient such as, but not limited to, 1,2,6-Hexanetriol; 1,2-Dimyristoyl-Sn-Glycero-3-(Phospho-S-(1-Glycerol)); 1,2-Dimyristoyl-Sn-Glycero-3-Phosphocholine; 1,2-Dioleoyl-Sn-Glycero-3-Phosphocholine; 1,2-Dipalmitoyl-Sn-Glycero-3-(Phospho-Rac-(1-Glycerol)); 1,2-Distearoyl-Sn-Glycero-3-(Phospho-Rac-(1-Glycerol)); 1,2-Distearoyl-Sn-Glycero-3-Phosphocholine; 1-O-Tolylbiguanide; 2-Ethyl-1,6-Hexanediol; Acetic Acid; Acetic Acid. Glacial; Acetic Anhydride; Acetone; Acetone Sodium Bisulfite; Acetylated Lanolin Alcohols; Acetylated Monoglycerides; Acetylcysteine; Acetyltryptophan, DL-; Acrylates Copolymer; Acrylic Acid-Isooctyl Acrylate Copolymer; Acrylic Adhesive 788; Activated Charcoal; Adcote 72A103; Adhesive Tape; Adipic Acid; Aerotex Resin 3730; Alanine; Albumin Aggregated; Albumin Colloidal; Albumin Human; Alcohol; Alcohol, Dehydrated; Alcohol, Denatured; Alcohol, Diluted; Alfadex; Alginic Acid; Alkyl Ammonium Sulfonic Acid Betaine; Alkyl Aryl Sodium Sulfonate; Allantoin; Allyl .Alpha.-Ionone; Almond Oil; Alpha-Terpineol; Alpha-Tocopherol; Alpha-Tocopherol Acetate, D1-; Alpha-Tocopherol, D1-; Aluminum Acetate; Aluminum Chlorhydroxy Allantoinate; Aluminum Hydroxide; Aluminum Hydroxide—Sucrose, Hydrated; Aluminum Hydroxide Gel; Aluminum Hydroxide Gel F 500; Aluminum Hydroxide Gel F 5000; Aluminum Monostearate; Aluminum Oxide; Aluminum Polyester; Aluminum Silicate; Aluminum Starch Octcnylsuccinate; Aluminum Stearate; Aluminum Subacetate; Aluminum Sulfate Anhydrous; Amerchol C; Amerchol-Cab; Aminomethylpropanol; Ammonia Ammonia Solution; Ammonia Solution, Strong; Ammonium Acetate; Ammonium Hydroxide; Ammonium Lauryl Sulfate; Ammonium Nonoxynol-4 Sulfate; Ammonium Salt Of C-12-C-15 Linear Primary Alcohol Ethoxylate; Ammonium Sulfate; Ammonyx; Amphoteric-2; Amphoteric-9; Anethole; Anhydrous Citric Acid; Anhydrous Dextrose; Anhydrous Lactose; Anhydrous Trisodium Citrate; Aniseed Oil; Anoxid Sbn; Antifoam; Antipyrine; Apaflurane; Apricot Kemel Oil Peg-6 Esters; Aquaphor; Arginine; Arlacel; Ascorbic Acid; Ascorbyl Palmitate; Aspartic Acid; Balsam Peru; Barium Sulfate; Beeswax; Beeswax, Synthetic; Beheneth-10; Bentonite; Benzalkonium Chloride; Benzenesulfonic Acid; Benzethonium Chloride; Benzododecinium Bromide; Benzoic Acid; Benzyl Alcohol; Benzyl Benzoate; Benzl Chloride; Betadex; Bibapcitide; Bismuth Subgallatc; Boric Acid; Brocrinat; Butane; Butyl Alcohol; Butyl Ester Of Vinyl Methyl Ether/Maleic Anhydride Copolymer (125000 Mw); Butyl Stearate; Butylated Hydroxyanisole; Butylated Hydroxytoluene; Butylene Glycol; Butylparaben; Butyric Acid; C20-40 Pareth-24; Caffeine; Calcium; Calcium Carbonate; Calcium Chloride; Calcium Gluceptate; Calcium Hydroxide; Calcium Lactate; Calcobutrol; Caldiamide Sodium; Caloxetate Trisodium; Calteridol Calcium; Canada Balsam; Caprylic/Capric Triglyceride; Caprylic/Capric/Stearic Triglyceride; Captan; Captisol; Caramel; Carbomer 1342; Carbomer 1382; Carbomer 934; Carbomer 934p; Carbomer 940; Carbomer 941; Carbomer 980; Carbomer 981; Carbomer Homopolymer Type B (Allyl Pentaerythritol Crosslinked); Carbomer Homopolymer Type C (Allyl Pentaerythritol Crosslinked); Carbon Dioxide; Carboxy Vinyl Copolymer; Carboxymethylcellulose; Carboxymethylcellulose Sodium; Carboxypolymethylene; Carrageenan; Carrageenan Salt; Castor Oil; Cedar Leaf Oil; Cellulose; Cellulose, Microcrystalline; Cerasynt-Se; Ceresin; Ceteareth-12; Ceteareth-15; Ceteareth-30; Cetcaryl Alcohol/Cetcarcth-20; Cetearyl Ethylhexanoate; Ceteth-10; Ceteth-2; Ceteth-20; Ceteth-23; Cetostearyl Alcohol; Cetrimonium Chloride; Cetyl Alcohol; Cetyl Esters Wax; Cetyl Palmitate; Cetylpyridinium Chloride; Chlorobutanol; Chlorobutanol Hemihydrate; Chlorobutanol, Anhydrous; Chlorocresol; Chloroxylenol; Cholesterol; Choleth; Choleth-24; Citrate; Citric Acid; Citric Acid Monohydrate; Citric Acid, Hydrous; Cocamide Ether Sulfate; Cocamine Oxide; Coco Betaine; Coco Diethanolamide; Coco Monoethanolamide; Cocoa Butter; Coco-Glycerides; Coconut Oil; Coconut Oil, Hydrogenated; Coconut Oil/Palm Kernel Oil Glycerides, Hydrogenated; Cocoyl Caprylocaprate; Cola Nitida Seed Extract; Collagen; Coloring Suspension; Corn Oil; Cottonseed Oil; Cream Base; Creatine Creatinine; Cresol; Croscarmellose Sodium; Crospovidone; Cupric Sulfate; Cupric Sulfate Anhydrous; Cyclomethicone; Cyclomethicone/Dimethicone Copolyol; Cysteine; Cysteine Hydrochloride; Cysteine Hydrochloride Anhydrous; Cysteine, D1-; D&C Red No. 28; D&C Red No. 33; D&C Red No. 36; D&C Red No. 39; D&C Yellow No. 10; Dalfampridine; Daubert 1-5 Pestr (Matte) 164z; Decyl Methyl Sulfoxide; Dehydag Wax Sx; Dehydroacetic Acid; Dehymuls E; Denatonium Benzoate; Deoxycholic Acid; Dextran; Dextran 40; Dextrin; Dextrose; Dextrose Monohydrate; Dextrose Solution; Diatrizoic Acid; Diazolidinyl Urea Dichlorobenzyl Alcohol; Dichlorodifluoromethane; Dichlorotetrafluoroethane; Diethanolamine; Diethyl Pyrocarbonate; Diethyl Sebacate; Diethylene Glycol Monoethyl Ether; Diethylhexyl Phthalate; Dihydroxyaluminum Aminoacetate; Diisopropanolamine; Diisopropyl Adipate; Diisopropyl Dilinoleate; Dimethicone 350; Dimethicone Copolyol; Dimethicone Mdx4-4210; Dimethicone Medical Fluid 360; Dimethyl isosorbide; Dimethyl Sulfoxide, Dimethylaminoethyl Methacrylate—Butyl Methacrylate—Methyl Methacrylate Copolymer; Dimethyldioctadecylammonium Bentonite; Dimethylsiloxane/Methylvinvlsiloxane Copolymer; Dinoseb Ammonium Salt; Dipalmitoylphosphatidylglycerol, D1-; Dipropylene Glycol; Disodium Cocoamphodiacetate; Disodium Laureth Sulfosuccinate; Disodium Lauryl Sulfosuccinate; Disodium Sulfosalicylate; Disofenin; Divinylbenzene Styrene Copolymer; Dmdm Hydantoin; Docosanol; Docusate Sodium; Duro-Tak 280-2516; Duro-Tak 387-2516; Duro-Tak 80-1196; Duro-Tak 87-2070; Duro-Tak 87-2194; Duro-Tak 87-2287; Duro-Tak 87-2296; Duro-Tak 87-2888; Duro-Tak 87-2979; Edetate Calcium Disodium; Edetate Disodium; Edetate Disodium Anhydrous; Edetate Sodium; Edetic Acid; Egg Phospholipids; Entsufon; Entsufon Sodium; Epilactose; Epitetracycline Hydrochloride; Essence Bouquet 9200; Ethanolamine Hydrochloride; Ethyl Acetate; Ethyl Oleate; Ethylcelluloses; Ethylene Glycol; Ethylene Vinyl Acetate Copolymer; Ethylenediamine; Ethylenediamine Dihydrochloride; Ethylene-Propylene Copolymer; Ethylene-Vinyl Acetate Copolymer (28% Vinyl Acetate); Ethylene-Vinyl Acetate Copolyner (9% Vinylacetate); Ethylhexyl Hydroxystearate; Ethylparaben; Eucalyptol; Exametazime; Fat, Edible; Fat, Hard; Fatty Acid Esters; Fatty Acid Pentaerythriol Ester; Fatty Acids; Fatty Alcohol Citrate; Fatty Alcohols; Fd&C Blue No. 1; Fd&C Green No. 3; Fd&C Red No. 4; Fd&C Red No. 40; Fd&C Yellow No. 10 (Delisted); Fd&C Yellow No. 5; Fd&C Yellow No. 6; Ferric Chloride; Ferric Oxide; Flavor 89-186; Flavor 89-259; Flavor Df-119; Flavor Df-1530; Flavor Enhancer; Flavor FIG. 827118; Flavor Raspberry Pfc-8407; Flavor Rhodia Pharmaceutical No. Rf 451; Fluorochlorohydrocarbons; Formaldehyde; Formaldehyde Solution; Fractionated Coconut Oil; Fragrance 3949-5; Fragrance 520a; Fragrance 6.007; Fragrance 91-122; Fragrance 9128-Y; Fragrance 93498g; Fragrance Balsam Pine No. 5124; Fragrance Bouquet 10328; Fragrance Chemoderm 6401-B; Fragrance Chemoderm 6411; Fragrance Cream No. 73457; Fragrance Cs-28197; Fragrance Felton 066m; Fragrance Firmenich 47373; Fragrance Givaudan Ess 9090/lc; Fragrance H-6540; Fragrance Herbal 10396; Fragrance Nj-1085; Fragrance P O F1-147; Fragrance Pa 52805; Fragrance Pera Derm D; Fragrance Rbd-9819; Fragrance Shaw Mudge U-7776; Fragrance Tf 044078; Fragrance Ungerer Honeysuckle K 2771; Fragrance UngererN5195; Fructose; Gadolinium Oxide; Galactose; Gamma Cyclodextrin; Gelatin; Gelatin, Crosslinked; Gelfoam Sponge; Gellan Gum (Low Acyl); Gelva 737; Gentisic Acid; Gentisic Acid Ethanolamide; Gluceptate Sodium; Gluceptate Sodium Dihydrate; Gluconolactone; Glucuronic Acid; Glutamic Acid, D1-; Glutathione; Glycerin; Glycerol Ester Of Hydrogenated Rosin; Glyceryl Citrate; Glyceryl Isostearate; Glyceryl Laurate; Glyceryl Monostearate; Glyceryl Oleate; Glyceryl Oleate/Propylene Glycol; Glyceryl Palmitate; Glyceryl Ricinoleate; Glyceryl Stearate; Glyceryl Stearate—Laureth-23; Glyceryl Stearate/Peg Stearate; Glyceryl Stearate/Peg-100 Stearate; Glyceryl Stearate/Peg-40 Stearate; Glyceryl Stearate-Stearamidoethyl Diethylamine; Glyceryl Trioleate; Glycine; Glycine Hydrochloride; Glycol Distearate; Glycol Stearate; Guanidine Hydrochloride; Guar Gum; Hair Conditioner (18n195-1m); Heptane; Hetastarch; Hexylene Glycol; High Density Polyethylene; Histidine; Human Albumin Microspheres; Hyaluronate Sodium; Hydrocarbon; Hydrocarbon Gel, Plasticized; Hydrochloric Acid; Hydrochloric Acid, Diluted; Hydrocortisone; Hydrogel Polymer; Hydrogen Peroxide; Hydrogenated Castor Oil; Hydrogenated Palm Oil; Hydrogenated Palm/Palm Kernel Oil Peg-6 Esters; Hydrogenated Polybutene 635-690; Hydroxide Ion; Hydroxyethyl Cellulose; Hydroxyethylpiperazine Ethane Sulfonic Acid; Hydroxymethyl Cellulose; Hydroxyoctacosanyl Hydroxystearate; Hydroxypropyl Cellulose; Hydroxypropyl Methylcellulose 2906; Hydroxypropyl-Beta-cyclodextrin; Hypromellose 2208 (15000 Mpa.S); Hypromellose 2910 (15000 Mpa.S); Hypromelloses; Imidurea; Iodine; lodoxamic Acid; lofetamine Hydrochloride; Irish Moss Extract; Isobutane; Isoceteth-20; Isoleucine; Isooctyl Acrylate; Isopropyl Alcohol; Isopropyl Isostearate; Isopropyl Myristate; Isopropyl Myristate—Myristyl Alcohol; Isopropyl Palmitate; Isopropyl Stearate; Isostearic Acid; Isosteary1 Alcohol; Isotonic Sodium Chloride Solution; Jelene; Kaolin; Kathon Cg; Kathon Cg II; Lactate; Lactic Acid; Lactic Acid, D1-; Lactic Acid, L-; Lactobionic Acid; Lactose; Lactose Monohydrate; Lactose, Hydrous; Laneth; Lanolin; Lanolin Alcohol—Mineral Oil; Lanolin Alcohols; Lanolin Anhydrous; Lanolin Cholesterols; Lanolin Nonionic Derivatives; Lanolin, Ethoxylated; Lanolin, Hydrogenated; Lauralkonium Chloride; Lauramine Oxide; Laurdimonium Hydrolyzed Animal Collagen; Laureth Sulfate; Laureth-2; Laureth-23; Laureth-4; Lauric Diethanolamide; Lauric Myristic Diethanolamide; Lauroyl Sarcosine; Laury Lactate; Lauryl Sulfate; Lavandula Angustifolia Flowering Top; Lecithin; Lecithin Unbleached; Lecithin, Egg; Lecithin, Hydrogenated; Lecithin, Hydrogenated Soy; Lecithin, Soybean; Lemon Oil; Leucine; Levulinic Acid; Lidofenin; Light Mineral Oil; Light Mineral Oil (85 Ssu); Limonene, (+/−)-; Lipocol Sc-15; Lvsine; Lysine Acetate; Lysine Monohydrate; Magnesium Aluminum Silicate; Magnesium Aluminum Silicate Hydrate; Magnesium Chloride; Magnesium Nitrate Magnesium Stearate; Maleic Acid; Mannitol; Maprofix; Mebrofenin; Medical Adhesive Modified S-15; Medical Antiform A-F Emulsion; Medronate Disodium; Medronic Acid; Meglumine; Menthol; Metacresol; Metaphosphoric Acid; Methanesulfonic Acid; Methionine; Methyl Alcohol; Methyl Gluceth-10; Methyl Gluceth-20; Methyl Gluceth-20 Sesquistearate; Methyl Glucose Sesquistearate; Methyl Laurate; Methyl Pyrrolidone; Methyl Salicylate; Methyl Stearate; Methylboronic Acid; Methylcellulose (4000 Mpa.S); Methylcelluloses; Methylchloroisothiazolinone; Methylene Blue; Methylisothiazolinone; Methylparaben; Microcrystalline Wax; Mineral Oil; Mono And Diglyceride; Monostearyl Citrate; Monothioglycerol; Multisterol Extract; Myristyl Alcohol; Myristyl Lactate; Myristyl-Gamma-Picolinium Chloride; N-(Carbamoyl-Methoxy Peg-40)-1,2-Distearoyl-Cephalin Sodium; N,N-Dimethylacetamide; Niacinamide; Nioxime; Nitric Acid; Nitrogen; Nonoxynol Iodine; Nonoxynol-15; Nonoxvnol-9; Norflurane; Oatmeal; Octadecene-1/Maleic Acid Copolymer; Octanoic Acid; Octisalate; Octoxynol-L; Octoxynol-40; Octoxynol-9; Octyldodecanol; Octylphenol Polymethylene; Oleic Acid; Oleth-10/Oleth-5; Oleth-2; Oleth-20; Oleyl Alcohol; Oleyl Oleate; Olive Oil Oxidronate Disodium; Oxyquinoline; Palm Kernel Oil; Palmitamine Oxide; Parabens; Paraffin; Paraffin, White Soft; Parfum Creme 45/3; Peanut Oil; Peanut Oil, Refined; Pectin; Peg 6-32 Stearate/Glycol Stearate; Peg Vegetable Oil; Peg-100 Stearate; Peg-12 Glyceryl Laurate; Peg-120 Glyceryl Stearate; Peg-120 Methyl Glucose Dioleate; Peg-15 Cocamine; Peg-150 Distearate; Peg-2 Stearate; Peg-20 Sorbitan Isostearate; Peg-22 Methyl Ether/Dodecyl Glycol Copolymer; Peg-25 Propylene Glycol Stearate; Peg-4 Dilaurate; Peg-4 Laurate; Peg-40 Castor Oil; Peg-40 Sorbitan Diisostearate; Peg-45/Dodecyl Glycol Copolymer; Peg-5 Oleate; Peg-50 Stearate; Peg-54 Hydrogenated Castor Oil; Peg-6 Isostearate; Peg-60 Castor Oil; Peg-60 Hydrogenated Castor Oil; Peg-7 Methyl Ether; Peg-75 Lanolin; Peg-8 Laurate; Peg-8 Stearate; Pegoxol 7 Stearate; Pentadecalactone Pentacrythritol Cocoate; Pentasodium Pentetate; Pentetate Calcium Trisodium; Pentetic Acid; Peppermint Oil; Perflutren; Perfume 25677; Perfume Bouquet; Perfume E-1991; Perfume Gd 5604; Perfume Tana 90/42 Scba; Perfume W-1952-1; Petrolatum; Petrolatum, White; Petroleum Distillates; Phenol; Phenol, Liquefied; Phenonip; Phenoxyethanol; Phenylalanine; Phenylethyl Alcohol; Phenylmercuric Acetate; Phenylmercuric Nitrate; Phosphatidyl Glycerol, Egg; Phospholipid; Phospholipid, Egg; Phospholipon 90g; Phosphoric Acid; Pine Needle Oil (Pinus Sylvestris); Piperazine Hexahydrate; Plastibase-50v; Polacrilin; Polidronium Chloride; Poloxamer 124; Poloxamer 181; Poloxamer 182; Poloxamer 188; Poloxamer 237; Poloxamer 407; Poly(Bis(P-Carboxvphenoxy)Propane Anhydride):Sebacic Acid; Poly(Dimethylsiloxane/Methylvinylsiloxane/Methylhydrogensiloxane) Dimethylvinyl Or Dimethylhydroxy Or Trimethyl Endblocked; Poly(D1-Lactic-Co-Glycolic Acid), (50:50; Poly(D1-Lactic-Co-Glycolic Acid), Ethyl Ester Terminated, (50:50; Polyacrylic Acid (250000 Mw); Polybutene (1400 Mw) Polycarbophil; Polyester; Polyester Polyamine Copolymer; Polyester Rayon; Polyethylene Glycol 1000; Polyethylene Glycol 1450; Polyethylene Glycol 1500; Polyethylene Glycol 1540; Polyethylene Glycol 200; Polyethylene Glycol 300; Polyethylene Glycol 300-1600; Polyethylene Glycol 3350; Polyethylene Glycol 400; Polyethylene Glycol 4000; Polyethylene Glycol 540; Polyethylene Glycol 600; Polyethylene Glycol 6000; Polyethylene Glycol 8000; Polyethylene Glycol 900; Polyethylene High Density Containing Ferric Oxide Black (<1%); Polyethylene Low Density Containing Barium Sulfate (20-24%); Polyethylene T; Polyethylene Terephthalates; Polyglactin; Polyglyceryl-3 Oleate; Polyglyceryl-4 Oleate; Polyhydroxyethyl Methacrylate; Polyisobutylene; Polyisobutylene (1100000 Mw); Polyisobutylene (35000 Mw); Polyisobutylene 178-236; Polyisobutylene 241-294; Polyisobutylene 35-39; Polyisobutylene Low Molecular Weight; Polyisobutylene Medium Molecular Weight; Polyisobutylene/Polybutene Adhesive; Polylactide; Polyols; Polyoxyethylene—Polyoxypropylene 1800; Polyoxyethylene Alcohols; Polyoxyethylene Fatty Acid Esters; Polyoxyethylene Propylene; Polyoxyl 20 Cetostearyl Ether; Polyoxyl 35 Castor Oil; Polyoxyl 40 Hydrogenated Castor Oil; Polyoxyl 40 Stearate; Polyoxyl 400 Stearate; Polyoxyl 6 And Polyoxyl 32 Palmitostearate; Polyoxyl Distearate; Polyoxyl Glyceryl Stearate; Polyoxyl Lanolin; Polyoxyl Palmitate; Polyoxyl Stearate; Polypropylene; Polypropylene Glycol; Polyquaternium-10; Polyquaternium-7 (70/30 Acrylamide/Dadmac; Polysiloxane; Polysorbate 20; Polysorbate 40; Polysorbate 60; Polysorbate 65; Polysorbate 80; Polyurethane; Polyvinyl Acetate; Polyvinyl Alcohol; Polyvinyl Chloride; Polyvinyl Chloride-Polyvinyl Acetate Copolymer; Polyvinylpyridine; Poppy Seed Oil; Potash; Potassium Acetate; Potassium Alum; Potassium Bicarbonate; Potassium Bisulfite; Potassium Chloride; Potassium Citrate; Potassium Hydroxide; Potassium Metabisulfite; Potassium Phosphate, Dibasic; Potassium Phosphate, Monobasic; Potassium Soap; Potassium Sorbate; Povidone Acrylate Copolymer; Povidone Hydrogel; Povidone K17; Povidone K25; Povidone K29/32; Povidone K30; Povidone K90; Povidone K90f; Povidone/Eicosene Copolymer; Povidones; Ppg-12/Smdi Copolymer; Ppg-15 Stearyl Ether; Ppg-20 Methyl Glucose Ether Distearate; Ppg-26 Oleate; Product Wat; Proline; Promulgen D; Promulgen G; Propane; Propellant A-46; Propyl Gallate; Propylene Carbonate; Propylene Glycol; Propylene Glycol Diacetate; Propylene Glycol Dicaprylate; Propylene Glycol Monolaurate; Propylene Glycol Monopalmitostearate; Propylene Glycol Palmitostearate; Propylene Glycol Ricinoleate; Propylene Glycol/Diazolidinyl Urea/Methylparaben/Propylparben; Propylparaben; Protamine Sulfate; Protein Hydrolysate; Pvm/Ma Copolymer; Quaternium-15; Quaternium-15 Cis-Form; Quaternium-52; Ra-2397; Ra-3011; Saccharin; Saccharin Sodium; Saccharin Sodium Anhydrous; Safflower Oil; Sd Alcohol 3a; Sd Alcohol 40; Sd Alcohol 40-2; Sd Alcohol 40b; Sepineo P 600; Serine; Sesame Oil; Shea Butter; Silastic Brand Medical Grade Tubing; Silastic Medical Adhesive, Silicone Type A; Silica, Dental; Silicon; Silicon Dioxide; Silicon Dioxide, Colloidal; Silicone; Silicone Adhesive 4102; Silicone Adhesive 4502; Silicone Adhesive Bio-Psa Q7-4201; Silicone Adhesive Bio-Psa Q7-4301; Silicone Emulsion; Silicone/Polyester Film Strip; Simethicone; Simethicone Emulsion; Sipon Ls 20np; Soda Ash; Sodium Acetate; Sodium Acetate Anhydrous; Sodium Alkyl Sulfate; Sodium Ascorbate; Sodium Benzoate; Sodium Bicarbonate; Sodium Bisulfate; Sodium Bisulfite; Sodium Borate; Sodium Borate Decahydrate; Sodium Carbonate; Sodium Carbonate Decahydrate; Sodium Carbonate Monohydrate; Sodium Cetostearyl Sulfate; Sodium Chlorate; Sodium Chloride; Sodium Chloride Injection; Sodium Chloride Injection, Bacteriostatic; Sodium Cholesteryl Sulfate; Sodium Citrate; Sodium Cocoyl Sarcosinate; Sodium Desoxycholate; Sodium Dithionite; Sodium Dodecylbenzenesulfonate; Sodium Formaldehyde Sulfoxylate; Sodium Gluconate; Sodium Hydroxide; Sodium Hypochlorite; Sodium Iodide; Sodium Lactate; Sodium Lactate, L-; Sodium Laureth-2 Sulfate; Sodium Laureth-3 Sulfate; Sodium Laureth-5 Sulfate; Sodium Lauroyl Sarcosinate; Sodium Lauryl Sulfate; Sodium Lauryl Sulfoacetate; Sodium Metabisulfite; Sodium Nitrate; Sodium Phosphate; Sodium Phosphate Dihydrate; Sodium Phosphate, Dibasic; Sodium Phosphate, Dibasic, Anhydrous; Sodium Phosphate, Dibasic, Dihydrate; Sodium Phosphate, Dibasic, Dodecahydrate; Sodium Phosphate, Dibasic, Heptahydrate; Sodium Phosphate, Monobasic; Sodium Phosphate, Monobasic. Anhydrous; Sodium Phosphate, Monobasic, Dihydrate; Sodium Phosphate. Monobasic, Monohydrate; Sodium Polyacrylate (2500000 Mw); Sodium Pyrophosphate; Sodium Pyrrolidone Carboxylate; Sodium Starch Glycolate; Sodium Succinate Hexahydrate; Sodium Sulfate; Sodium Sulfate Anhydrous; Sodium Sulfate Decahydrate; Sodium Sulfite; Sodium Sulfosuccinated Undecyclenic Monoalkylolamide; Sodium Tartrate; Sodium Thioglycolate; Sodium Thiomalate; Sodium Thiosulfate; Sodium Thiosulfate Anhydrous; Sodium Trimetaphosphate; Sodium Xylenesulfonate; Somay 44; Sorbic Acid, Sorbitan; Sorbitan Isostearate; Sorbitan Monolaurate; Sorbitan Monooleate; Sorbitan Monopalmitate; Sorbitan Monostearate; Sorbitan Sesquioleate; Sorbitan Trioleate; Sorbitan Tristearate; Sorbitol; Sorbitol Solution; Soybean Flour; Soybean Oil; Spearmint Oil; Spermaceti. Squalane; Stabilized Oxychloro Complex; Stannous 2-Ethylhexanoate; Stannous Chloride; Stannous Chloride Anhydrous; Stannous Fluoride; Stannous Tartrate; Starch; Starch 1500, Pregelatinized; Starch, Corn; Stearalkonium Chloride; Stearalkonium Hectorite/Propylene Carbonate; Stearamidoethyl Diethylamine; Steareth-10; Steareth-100; Steareth-2; Steareth-20; Steareth-21; Steareth-40; Stearic Acid; Stearic Diethanolamide; Stearoxytrimethylsilane; Steartrimonium Hydrolyzed Animal Collagen; Stearyl Alcohol; Sterile Water For Inhalation; Styrene/Isoprene/Styrene Block Copolymer; Succimer; Succinic Acid; Sucralose; Sucrose; Sucrose Distearate; Sucrose Polyesters; Sulfacetamide Sodium; Sulfobutvlether .Beta.-Cyclodextrin; Sulfur Dioxide; Sulfuric Acid; Sulfurous Acid; Surfactol Qs; Tagatose, D-; Talc; Tall Oil; Tallow Glycerides; Tartaric Acid; Tartaric Acid, D1-; Tenox; Tenox-2; Tert-Butyl Alcohol; Tert-Butyl Hydroperoxide; Tert-Butylhydroquinone; Tetrakis(2-Methoxyisobutylisocyanide)Copper(I) Tetrafluoroborate; Tetrapropyl Orthosilicate; Tetrofosmin; Theophylline; Thimerosal; Threonine; Thymol; Tin; Titanium Dioxide; Tocopherol; Tocophersolan; Total parenteral nutrition, lipid emulsion; Triacetin; Tricaprylin; Trichloromonofluoromethane; Trideceth-10; Triethanolamine Lauryl Sulfate; Trifluoroacetic Acid; Triglycerides, Medium Chain; Trihydroxystearin; Trilaneth-4 Phosphate; Trilaureth-4 Phosphate; Trisodium Citrate Dihydrate; Trisodium Hedta; Triton 720; Triton X-200; Trolamine; Tromantadine; Tromethamine (TRIS); Tryptophan; Tyloxapol; Tyrosine; Undecylenic Acid; Union 76 Amsco-Res 6038; Urea; Valine; Vegetable Oil; Vegetable Oil Glyceride, Hydrogenated; Vegetable Oil, Hydrogenated; Versetamide; Viscarin; Viscose/Cotton; Vitamin E; Wax, Emulsifying; Wecobee Fs; White Ceresin Wax; White Wax. Xanthan Gum; Zinc; Zinc Acetate; Zinc Carbonate; Zinc Chloride; and Zinc Oxide.

[0439] Pharmaceutical composition formulations of AAV particles disclosed herein may include cations or anions. In one embodiment, the formulations include metal cations such as, but not limited to, Zn2+, Ca2+, Cu2+, Mn2+, Mg+ and combinations thereof. As a non-limiting example, formulations may include polymers and complexes with a metal cation (See e.g., U.S. Pat. Nos. 6,265,389 and 6,555,525, the contents of each of which are herein incorporated by reference in their entirety).

[0440] Formulations of the disclosure may also include one or more pharmaceutically acceptable salts. As used herein, “pharmaceutically acceptable salts” refers to derivatives of the disclosed compounds wherein the parent compound is modified by converting an existing acid or base moiety to its salt form (e.g., by reacting the free base group with a suitable organic acid). Examples of pharmaceutically acceptable salts include, but are not limited to, mineral or organic acid salts of basic residues such as amines; alkali or organic salts of acidic residues such as carboxylic acids; and the like. Representative acid addition salts include acetate, acetic acid, adipate, alginate, ascorbate, aspartate, benzenesulfonate, benzene sulfonic acid, benzoate, bisulfate, borate, butyrate, camphorate, camphorsulfonate, citrate, cyclopentanepropionate, digluconate, dodecylsulfate, ethanesulfonate, fumarate, glucoheptonate, glycerophosphate, hemisulfate, heptonate, hexanoate, hydrobromide, hydrochloride, hydroiodide, 2-hydroxy-ethanesulfonate, lactobionate, lactate, laurate, lauryl sulfate, malate, maleate, malonate, methanesulfonate, 2-naphthalcnesulfonate, nicotinate, nitrate, oleate, oxalate, palmitate, pamoate, pectinate, persulfate, 3-phenylpropionate, phosphate, picrate, pivalate, propionate, stearate, succinate, sulfate, tartrate, thiocyanate, toluenesulfonate, undecanoate, valerate salts, and the like. Representative alkali or alkaline earth metal salts include sodium, lithium, potassium, calcium, magnesium, and the like, as well as nontoxic ammonium, quaternary ammonium, and amine cations, including, but not limited to ammonium, tetramethylammonium, tetraethylammonium, methylamine, dimethylamine, trimethylamine, triethylamine, ethylamine, and the like. The pharmaceutically acceptable salts of the present disclosure include the conventional non-toxic salts of the parent compound formed, for example, from non-toxic inorganic or organic acids.

[0441] The pharmaceutically acceptable salts of the present disclosure can be synthesized from the parent compound which contains a basic or acidic moiety by conventional chemical methods. Generally, such salts can be prepared by reacting the free acid or base forms of these compounds with a stoichiometric amount of the appropriate base or acid in water or in an organic solvent, or in a mixture of the two; generally, nonaqueous media like ether, ethyl acetate, ethanol, isopropanol, or acetonitrile are preferred. Lists of suitable salts are found in Remington's Pharmaceutical Sciences, 17th ed., Mack Publishing Company, Easton, Pa., 1985, p. 1418, Pharmaceutical Salts: Properties, Selection, and Use, P. H. Stahl and C. G. Wermuth (eds.). Wiley-VCH, 2008, and Berge et al., Journal of Pharmaceutical Science, 66, 1-19 (1977); the contents of each of which are incorporated herein by reference in their entirety.

[0442] The term “pharmaceutically acceptable solvate,” as used herein, means a compound wherein molecules of a suitable solvent are incorporated in the crystal lattice. A suitable solvent is physiologically tolerable at the dosage administered. Solvates may be prepared by crystallization, recrystallization, or precipitation from a solution that includes organic solvents, water, or a mixture thereof. Examples of suitable solvents are ethanol, water (for example, mono-, di-, and tri-hydrates), N-methylpyrrolidinone (NMP), dimethyl sulfoxide (DMSO), N,N′-dimethylformamide (DMF), N,N′-dimethylacetamide (DMAC), 1,3-dimethyl-2-imidazolidinone (DMEU), 1,3-dimethyl-3,4,5,6-tetrahydro-2-(1H)-pyrimidinone (DMPU), acetonitrile (ACN), propylene glycol, ethyl acetate, benzyl alcohol, 2-pyrrolidone, benzyl benzoate, and the like. When water is the solvent, the solvate is referred to as a “hydrate.”

### III. ADMINISTRATION AND DOSING

### Administration

[0443] In one embodiment, the AAV particle may be administered to a subject (e.g., to the CNS or PNS of a subject) in a therapeutically effective amount to reduce the symptoms of neurological disease of a subject (e.g., determined using a known evaluation method).

[0444] The AAV particles of the present disclosure may be administered by any delivery route which results in a therapeutically effective outcome. These include, but are not limited to, enteral (into the intestine), gastroenteral, epidural (into the dura mater), oral (by way of the mouth), transdermal, intracerebral (into the cerebrum), intracerebroventricular (into the cerebral ventricles), sub-pial (between pia and CNS parenchyma), intracarotid arterial (into the intracarotid artery), epicutaneous (application onto the skin), intradermal, (into the skin itself), subcutaneous (under the skin), nasal administration (through the nose), intravenous (into a vein), intravenous bolus, intravenous drip, intra-arterial (into an artery), systemic, intramuscular (into a muscle), intracardiac (into the heart), intraosseous infusion (into the bone marrow), intrathecal (into the spinal canal), intraparenchymal (into brain tissue), intraperitoneal, (infusion or injection into the peritoneum), intravesical infusion, intravitreal, (through the eye), intracavernous injection (into a pathologic cavity) intracavitary (into the base of the penis), intravaginal administration, intrauterine, extra-amniotic administration, transdermal (diffusion through the intact skin for systemic distribution), transmucosal (diffusion through a mucous membrane), transvaginal, insufflation (snorting), sublingual, sublabial, enema, eye drops (onto the conjunctiva), or in ear drops, auricular (in or by way of the ear), buccal (directed toward the cheek), conjunctival, cutaneous, dental (to a tooth or teeth), electro-osmosis, endocervical, endosinusial, endotracheal, extracorporeal, hemodialysis, infiltration, interstitial, intra-abdominal, intra-amniotic, intra-articular, intrabiliary, intrabronchial, intrabursal, intracartilaginous (within a cartilage), intracaudal (within the cauda equine), intracisternal (within the cisterna magna cerebellomedularis), intracorneal (within the cornea), dental intracoronal, intracoronary (within the coronary arteries), intracorporus cavernosum (within the dilatable spaces of the corporus cavernosa of the penis), intradiscal (within a disc), intraductal (within a duct of a gland), intraduodenal (within the duodenum), intradural (within or beneath the dura), intraepidermal (to the epidermis), intraesophageal (to the esophagus), intragastric (within the stomach), intragingival (within the gingivae), intraileal (within the distal portion of the small intestine), intralesional (within or introduced directly to a localized lesion), intraluminal (within a lumen of a tube), intralymphatic (within the lymph), intramedullary (within the marrow cavity of a bone), intrameningeal (within the meninges), intramyocardial (within the myocardium), intraocular (within the eye), intraovarian (within the ovary), intrapericardial (within the pericardium), intrapleural (within the pleura), intraprostatic (within the prostate gland), intrapulmonary (within the lungs or its bronchi), intrasinal (within the nasal or periorbital sinuses), intraspinal (within the vertebral column), intrasynovial (within the synovial cavity of a joint), intratendinous (within a tendon), intratesticular (within the testicle), intrathecal (within the cerebrospinal fluid at any level of the cerebrospinal axis), intrathoracic (within the thorax), intratubular (within the tubules of an organ), intratumor (within a tumor), intratympanic (within the aurus media), intravascular (within a vessel or vessels), intraventricular (within a ventricle), iontophoresis (by means of electric current where ions of soluble salts migrate into the tissues of the body), irrigation (to bathe or flush open wounds or body cavities), laryngeal (directly upon the larynx), nasogastric (through the nose and into the stomach), occlusive dressing technique (topical route administration which is then covered by a dressing which occludes the area), ophthalmic (to the external eye), oropharyngeal (directly to the mouth and pharynx), parenteral, percutaneous, periarticular, peridural, perineural, periodontal, rectal, respiratory (within the respiratory tract by inhaling orally or nasally for local or systemic effect), retrobulbar (behind the pons or behind the eyeball), soft tissue, subarachnoid, subconjunctival, submucosal, topical, transplacental (through or across the placenta), transtracheal (through the wall of the trachea), transtympanic (across or through the tympanic cavity), ureteral (to the ureter), urethral (to the urethra), vaginal, caudal block, diagnostic, nerve block, biliary perfusion, cardiac perfusion, photopheresis and spinal.

[0445] In some embodiments, the AAV particles and compositions comprising the AAV particles may be administered in a way which allows them to cross the blood-brain barrier, vascular barrier, or other epithelial barrier. In some embodiments, the AAV particles and compositions comprising AAV particles may be administered in a way that leverages the vascular connectivity of the central nervous system, such as, but not limited to, by intravenous administration. While not wishing to be bound by theory, cells of the brain are typically within 20 μm of the nearest capillary, making capillaries a good conduit for AAV particles described herein.

[0446] The AAV particles described herein may be administered in any suitable form, either as a liquid solution or suspension, as a solid form suitable for liquid solution or suspension in a liquid solution. The AAV particles may be formulated with any appropriate and pharmaceutically acceptable excipient.

[0447] In one embodiment, the AAV particles described herein may be delivered to a subject via a single route administration.

[0448] In one embodiment, the AAV particles described herein may be delivered to a subject via a multi-site route of administration. AAV particles may be administered at 2, 3, 4, 5 or more than 5 sites.

[0449] In one embodiment, a subject may be administered the AAV particles described herein using a bolus infusion.

[0450] In one embodiment, a subject may be administered the AAV particles described herein using sustained delivery over a period of minutes, hours or days. The infusion rate may be changed depending on the subject, distribution, formulation or another delivery parameter.

[0451] In one embodiment, the AAV particles described herein may be delivered by intramuscular delivery route. (See, e.g., U.S. Pat. No. 6,506,379; the contents of which are incorporated herein by reference in their entirety). Non-limiting examples of intramuscular administration include an intravenous injection or a subcutaneous injection.

[0452] In one embodiment, the AAV particles described herein may be delivered by intraocular delivery route. A non-limiting example of intraocular administration includes an intravitreal injection.

[0453] In some embodiments, the AAV particles that may be administered to a subject by peripheral injections. Non-limiting examples of peripheral injections include intraperitoneal, intramuscular, intravenous, conjunctival or joint injection. It was disclosed in the art that the peripheral administration of AAV particles can be transported to the central nervous system, for example, to the motor neurons (e.g., U. S. Patent Application Publication Nos. 20100240739; and 20100130594; the contents of each of which are incorporated herein by reference in their entirety).

[0454] In one embodiment, the AAV particles may be delivered by injection into the CSF (Cerebrospinal fluid) pathway. Non-limiting examples of delivery to the CSF pathway include intrathecal and intracerebroventricular administration.

[0455] In one embodiment, the AAV particles may be delivered by systemic delivery. As a non-limiting example, the systemic delivery may be by intravascular administration.

[0456] In one embodiment, the AAV particles described herein may be administered to a subject by intracranial delivery (See, e.g., U.S. Pat. No. 8,119,611; the contents of which are incorporated herein by reference in their entirety).

[0457] In some embodiments, the AAV particles described herein may be administered by injection. As a non-limiting example, the AAV particles †may be administered to a subject by injection.

[0458] In some embodiments, the AAV particles described herein may be administered by muscular injection. As a non-limiting example, the AAV particles may be administered to a subject by muscular administration.

[0459] In some embodiments, the AAV particles described herein may be administered by intramuscular administration. As a non-limiting example, the AAV particles may be administered to a subject by intramuscular administration.

[0460] In one embodiment, the AAV particles described herein are administered to a subject and transduce muscle of a subject. As a non-limiting example, the AAV particles are administered by intramuscular administration.

[0461] In some embodiments, the AAV particles described herein may be administered via intraparenchymal injection. As a non-limiting example, the AAV particles may be administered to a subject by intraparenchymal administration.

[0462] In some embodiments, the AAV particles described herein may be administered by intravenous administration. As a non-limiting example, the AAV particles may be administered to a subject by intravenous administration.

[0463] In one embodiment, the AAV particles described herein may be administered via intravenous delivery.

[0464] In one embodiment, the AAV particles described herein may be administrated via intracarotid arterial delivery.

[0465] In one embodiment, the AAV particles described herein may be administered via a single dose intravenous delivery. As a non-limiting example, the single dose intravenous delivery may be a one-time treatment. In the context of neurological disease, the single dose intravenous delivery can produce durable relief for subjects with a neurological disease and/or related symptoms. The relief may last for minutes such as, but not limited to, 1, 2, 3, 4, 5, 6, 7, 8, 9, 10, 11, 12, 13, 14, 15, 16, 17, 18, 19, 20, 21, 22, 23, 24, 25, 26, 27, 28, 29, 30, 31, 32, 33, 34, 35, 36, 37, 38, 39, 40, 41, 42, 43, 44, 45, 46, 47, 48, 49, 50, 51, 52, 53, 54, 55, 56, 57, 58, 59 minutes or more than 59 minutes; hours such as, but not limited to, 1, 2, 1, 2, 3, 4, 5, 6, 7, 8, 9, 10, 11, 12, 13, 14, 15, 16, 17, 18, 19, 20, 21, 22, 23, 24, 25, 26, 27, 28, 29, 30, 31, 32, 33, 34, 35, 36, 37, 38, 39, 40, 41, 42, 43, 44, 45, 46, 47, 48, or more than 48 hours; days such as, but not limited to, 1, 2, 3, 4, 5, 6, 7, 8, 9, 10, 11, 12, 13, 14, 15, 16, 17, 18, 19, 20, 21, 22, 23, 24, 25, 26, 27, 28, 29, 30, 31, or more than 31 days; weeks such as, but not limited to, 1, 2, 3, 4, 5, 6, 7, 8, 9, 10, 11, 12, 13, 14, 15, 16, or more than 16 weeks; months such as, but not limited to, 1, 2, 3, 4, 5, 6, 7, 8, 9, 10, 11, 12, 13, 14, 15, 16, 17, 18, 19, 20, 21, 22, 23, 24, or more than 24 months; years such as, but not limited to, 1, 2, 3, 4, 5, 6, 7, 8, 9, 10, I1, 12, 13, 14, 15, or more than 15 years.

[0466] In one embodiment, the AAV particles described herein may be administered via intravenous delivery to the DRG nociceptive neurons.

[0467] In one embodiment, the AAV particles described herein may be administered via a single dose intravenous delivery to the DRG nociceptive neurons. As a non-limiting example, the single dose intravenous delivery may be a one-time treatment. In the context of neurological disease, the single dose intravenous delivery can produce durable relief for subjects with a neurological disease and/or related symptoms. The relief may last for minutes such as, but not limited to, 1, 2, 3, 4, 5, 6, 7, 8, 9, 10, 11, 12, 13, 14, 15, 16, 17, 18, 19, 20, 21, 22, 23, 24, 25, 26, 27, 28, 29, 30, 31, 32, 33, 34, 35, 36, 37, 38, 39, 40, 41, 42, 43, 44, 45, 46, 47, 48, 49, 50, 51, 52, 53, 54, 55, 56, 57, 58, 59 minutes or more than 59 minutes hours such as, but not limited to, 1, 2, 1, 2, 3, 4, 5, 6, 7, 8, 9, 10, 11, 12, 13, 14, 15, 16, 17, 18, 19, 20, 21, 22, 23, 24, 25, 26, 27, 28, 29, 30, 31, 32, 33, 34, 35, 36, 37, 38, 39, 40, 41, 42, 43, 44, 45, 46, 47, 48, or more than 48 hours; days such as, but not limited to, 1, 2, 3, 4, 5, 6, 7, 8, 9, 10, 11, 12, 13, 14, 15, 16, 17, 18, 19, 20, 21, 22, 23, 24, 25, 26, 27, 28, 29, 30, 31, or more than 31 days; weeks such as, but not limited to, 1, 2, 3, 4, 5, 6, 7, 8, 9, 10, 11, 12, 13, 14, 15, 16, or more than 16 weeks; months such as, but not limited to, 1, 2, 3, 4, 5, 6, 7, 8, 9, 10, 11, 12, 13, 14, 15, 16, 17, 18, 19, 20, 21, 22, 23, 24, or more than 24 months; years such as, but not limited to, 1, 2, 3, 4, 5, 6, 7, 8, 9, 10, 11, 12, 13, 14, 15, or more than 15 years.

[0468] In some embodiments, the AAV particles described herein may be administered by intrathecal injection.

[0469] In one embodiment, the AAV particles may be administered to the cisterna magna in a therapeutically effective amount to transduce spinal cord motor neurons and/or astrocytes. As a non-limiting example, the AAV particle may be administered intrathecally.

[0470] In one embodiment, the AAV particles may be administered using intrathecal infusion in a therapeutically effective amount to transduce spinal cord motor neurons and/or astrocytes.

[0471] In some embodiments, the AAV particles of the present invention may be administered via a single dose intrathecal injection. As a non-limiting example, the single dose intrathecal injection may be a one-time treatment. In the context of neurological disease, the single dose intrathecal injection can produce durable relief for subjects with a neurological disease and/or related symptoms. The relief may last for minutes such as, but not limited to, 1, 2, 3, 4, 5, 6, 7, 8, 9, 10, 11, 12, 13, 14, 15, 16, 17, 18, 19, 20, 21, 22, 23, 24, 25, 26, 27, 28, 29, 30, 31, 32, 33, 34, 35, 36, 37, 38, 39, 40, 41, 42, 43, 44, 45, 46, 47, 48, 49, 50, 51, 52, 53, 54, 55, 56, 57, 58, 59 minutes or more than 59 minutes; hours such as, but not limited to, 1, 2, 1, 2, 3, 4, 5, 6, 7, 8, 9, 10, 11, 12, 13, 14, 15, 16, 17, 18, 19, 20, 21, 22, 23, 24, 25, 26, 27, 28, 29, 30, 31, 32, 33, 34, 35, 36, 37, 38, 39, 40, 41, 42, 43, 44, 45, 46, 47, 48, or more than 48 hours; days such as, but not limited to, 1, 2, 3, 4, 5, 6, 7, 8, 9, 10, 11, 12, 13, 14, 15, 16, 17, 18, 19, 20, 21, 22, 23, 24, 25, 26, 27, 28, 29, 30, 31, or more than 31 days; weeks such as, but not limited to, 1, 2, 3, 4, 5, 6, 7, 8, 9, 10, 11, 12, 13, 14, 15, 16, or more than 16 weeks; months such as, but not limited to, 1, 2, 3, 4, 5, 6, 7, 8, 9, 10, 11, 12, 13, 14, 15, 16, 17, 18, 19, 20, 21, 22, 23, 24, or more than 24 months; years such as, but not limited to, 1, 2, 3, 4, 5, 6, 7, 8, 9, 10, 11, 12, 13, 14, 15, or more than 15 years.

[0472] In some embodiments, the AAV particles described herein may be administered via intrathecal injection to the DRG nociceptive neurons.

[0473] In some embodiments, the AAV particles described herein may be administered via a single dose intrathecal injection to the DRG nociceptive neurons. As a non-limiting example, the single dose intrathecal injection may be a one-time treatment. In the context of neurological disease, the single dose intrathecal injection can produce durable relief for subjects with a neurological disease and/or related symptoms. The relief may last for minutes such as, but not limited to, 1, 2, 3, 4, 5, 6, 7, 8, 9, 10, 11, 12, 13, 14, 15, 16, 17, 18, 19, 20, 21, 22, 23, 24, 25, 26, 27, 28, 29, 30, 31, 32, 33, 34, 35, 36, 37, 38, 39, 40, 41, 42, 43, 44, 45, 46, 47, 48, 49, 50, 51, 52, 53, 54, 55, 56, 57, 58, 59 minutes or more than 59 minutes; hours such as, but not limited to, 1, 2, 1, 2, 3, 4, 5, 6, 7, 8, 9, 10, 11, 12, 13, 14, 15, 16, 17, 18, 19, 20, 21, 22, 23, 24, 25, 26, 27, 28, 29, 30, 31, 32, 33, 34, 35, 36, 37, 38, 39, 40, 41, 42, 43, 44, 45, 46, 47, 48, or more than 48 hours; days such as, but not limited to, 1, 2, 3, 4, 5, 6, 7, 8, 9, 10, 11, 12, 13, 14, 15, 16, 17, 18, 19, 20, 21, 22, 23, 24, 25, 26, 27, 28, 29, 30, 31, or more than 31 days; weeks such as, but not limited to, 1, 2, 3, 4, 5, 6, 7, 8, 9, 10, 11, 12, 13, 14, 15, 16, or more than 16 weeks; months such as, but not limited to, 1, 2, 3, 4, 5, 6, 7, 8, 9, 10, 11, 12, 13, 14, 15, 16, 17, 18, 19, 20, 21, 22, 23, 24, or more than 24 months; years such as, but not limited to, 1, 2, 3, 4, 5, 6, 7, 8, 9, 10, 11, 12, 13, 14, 15, or more than 15 years.

[0474] In one embodiment, the AAV particle described herein is administered via intrathecal (IT) infusion at C1. The infusion may be for 1, 2, 3, 4, 6, 7, 8, 9, 10, 11, 12, 13, 14, 15 or more than 15 hours.

[0475] In some embodiments, the AAV particles described herein may be administered by intraparenchymal injection. As a non-limiting example, the AAV particles may be administered to a subject by intraparenchymal injection.

[0476] In some embodiments, the AAV particles described herein may be administered by intraparenchymal injection and intrathecal injection. As a non-limiting example, the AAV particles may be administered via intraparenchymal injection and intrathecal injection.

[0477] In some embodiments, the AAV particles described herein may be administered by subcutaneous injection. As a non-limiting example, the AAV particles may be administered to a subject by subcutaneous injection.

[0478] In some embodiments, the AAV particles described herein may be administered topically. As a non-limiting example, the AAV particles may be administered to a subject topically.

[0479] In one embodiment, the AAV particles may be delivered by direct injection into the brain. As a non-limiting example, the brain delivery may be by intrastriatal administration.

[0480] In one embodiment, the AAV particles described herein may be administered via intrastriatal injection.

[0481] In one embodiment, the AAV particles described herein may be administered via intrastriatal injection and another route of administration described herein.

[0482] In one embodiment, the AAV particles may be delivered by more than one route of administration. As non-limiting examples of combination administrations. AAV particles may be delivered by intrathecal and intracerebroventricular, or by intravenous and intraparenchymal administration.

[0483] In one embodiment, the AAV particle may be administered to the CNS in a therapeutically effective amount to improve function and/or survival for a subject with a neurological disease. As a non-limiting example, the vector may be administered intravenously.

[0484] The AAV particle may be administered in a “therapeutically effective” amount, i.e., an amount that is sufficient to alleviate and/or prevent at least one symptom associated with the disease, or provide improvement in the condition of the subject.

[0485] In one embodiment, the catheter may be located at more than one site in the spine for multi-site delivery. The AAV particle may be delivered in a continuous and/or bolus infusion. Each site of delivery may be a different dosing regimen or the same dosing regimen may be used for each site of delivery. As a non-limiting example, the sites of delivery may be in the cervical and the lumbar region. As another non-limiting example, the sites of delivery may be in the cervical region. As another non-limiting example, the sites of delivery may be in the lumbar region.

[0486] In one embodiment, a subject may be analyzed for spinal anatomy and pathology prior to delivery of the AAV particle described herein. As a non-limiting example, a subject with scoliosis may have a different dosing regimen and/or catheter location compared to a subject without scoliosis.

[0487] In one embodiment, the orientation of the spine of the subject during delivery of the AAV particle may be vertical to the ground.

[0488] In another embodiment, the orientation of the spine of the subject during delivery of the AAV particle may be horizontal to the ground.

[0489] In one embodiment, the spine of the subject may be at an angle as compared to the ground during the delivery of the AAV particle. The angle of the spine of the subject as compared to the ground may be at least 10, 20, 30, 40, 50, 60, 70, 80, 90, 100, 110, 120, 130, 140, 150 or 180 degrees.

[0490] In one embodiment, the delivery method and duration is chosen to provide broad transduction in the spinal cord. As a non-limiting example, intrathecal delivery is used to provide broad transduction along the rostral-caudal length of the spinal cord. As another non-limiting example, multi-site infusions provide a more uniform transduction along the rostral-caudal length of the spinal cord. As yet another non-limiting example, prolonged infusions provide a more uniform transduction along the rostral-caudal length of the spinal cord.

### Parenteral and Injectable Administration

[0491] In some embodiments, pharmaceutical compositions, AAV particles of the present disclosure may be administered parenterally. Liquid dosage forms for oral and parenteral administration include, but are not limited to, pharmaceutically acceptable emulsions, microemulsions, solutions, suspensions, syrups, and/or elixirs. In addition to active ingredients, liquid dosage forms may comprise inert diluents commonly used in the art such as, for example, water or other solvents, solubilizing agents and emulsifiers such as ethyl alcohol, isopropyl alcohol, ethyl carbonate, ethyl acetate, benzyl alcohol, benzyl benzoate, propylene glycol, 1,3-butylene glycol, dimethylformamide, oils (in particular, cottonseed, groundnut, con, germ, olive, castor, and sesame oils), glycerol, tetrahydrofurfuryl alcohol, polyethylene glycols and fatty acid esters of sorbitan, and mixtures thereof. Besides inert diluents, oral compositions can include adjuvants such as wetting agents, emulsifying and suspending agents, sweetening, flavoring, and/or perfuming agents. In certain embodiments for parenteral administration, compositions are mixed with solubilizing agents such as CREMOPHOR*, alcohols, oils, modified oils, glycols, polysorbates, cyclodextrins, polymers, and/or combinations thereof. In other embodiments, surfactants are included such as hydroxypropylcellulose.

[0492] Injectable preparations, for example, sterile injectable aqueous or oleaginous suspensions may be formulated according to the known art using suitable dispersing agents, wetting agents, and/or suspending agents. Sterile injectable preparations may be sterile injectable solutions, suspensions, and/or emulsions in nontoxic parenterally acceptable diluents and/or solvents, for example, as a solution in 1,3-butanediol. Among the acceptable vehicles and solvents that may be employed are water, Ringer's solution, U.S.P., and isotonic sodium chloride solution. Sterile, fixed oils are conventionally employed as a solvent or suspending medium. For this purpose, any bland fixed oil can be employed including synthetic mono- or diglycerides. Fatty acids such as oleic acid can be used in the preparation of injectables.

[0493] Injectable formulations may be sterilized, for example, by filtration through a bacterial-retaining filter, and/or by incorporating sterilizing agents in the form of sterile solid compositions which can be dissolved or dispersed in sterile water or other sterile injectable medium prior to use.

[0494] In order to prolong the effect of active ingredients, it is often desirable to slow the absorption of active ingredients from subcutaneous or intramuscular injections. This may be accomplished by the use of liquid suspensions of crystalline or amorphous material with poor water solubility. The rate of absorption of active ingredients depends upon the rate of dissolution which, in turn, may depend upon crystal size and crystalline form. Alternatively, delayed absorption of a parenterally administered drug form is accomplished by dissolving or suspending the drug in an oil vehicle. Injectable depot forms are made by forming microencapsule matrices of the drug in biodegradable polymers such as polylactide-polyglycolide. Depending upon the ratio of drug to polymer and the nature of the particular polymer employed, the rate of drug release can be controlled. Examples of other biodegradable polymers include poly(orthoesters) and poly(anhydrides). Depot injectable formulations are prepared by entrapping the drug in liposomes or microemulsions which are compatible with body tissues.

### Depot Administration

[0495] As described herein, in some embodiments, pharmaceutical compositions, AAV particles of the present disclosure are formulated in depots for extended release. Generally, specific organs or tissues (“target tissues”) are targeted for administration.

[0496] In some aspects, pharmaceutical compositions, AAV particles of the present disclosure are spatially retained within or proximal to target tissues. Provided are methods of providing pharmaceutical compositions, AAV particles, to target tissues of mammalian subjects by contacting target tissues (which comprise one or more target cells) with pharmaceutical compositions, AAV particles, under conditions such that they are substantially retained in target tissues, meaning that at least 10, 20, 30, 40, 50, 60, 70, 80, 85, 90, 95, 96, 97, 98, 99, 99.9, 99.99 or greater than 99.99% of the composition is retained in the target tissues. Advantageously, retention is determined by measuring the amount of pharmaceutical compositions, AAV particles that enter one or more target cells. For example, at least 1%, 5%, 10%, 20%, 30%, 40%, 50%, 60%, 70%, 80%, 85%, 90%, 95%, 96%, 97%, 98%, 99%, 99.9%, 99.99% or greater than 99.99% of pharmaceutical compositions, AAV particles, administered to subjects are present intracellularly at a period of time following administration. For example, intramuscular injection to mammalian subjects may be performed using aqueous compositions comprising pharmaceutical compositions, AAV particles described herein and one or more transfection reagents, and retention is determined by measuring the amount of pharmaceutical compositions, AAV particles, present in target cells.

[0497] Certain aspects of the disclosure are directed to methods of providing pharmaceutical compositions, AAV particles described herein to target tissues of mammalian subjects, by contacting target tissues (comprising one or more target cells) with pharmaceutical compositions, AAV particles under conditions such that they are substantially retained in such target tissues. Pharmaceutical compositions, AAV particles comprise enough active ingredient such that the effect of interest is produced in at least one target cell. In some embodiments, pharmaceutical compositions, AAV particles generally comprise one or more cell penetration agents, although “naked” formulations (such as without cell penetration agents or other agents) are also contemplated, with or without pharmaceutically acceptable carriers.

### Pulmonary Administration

[0498] In some embodiments, pharmaceutical compositions or AAV particles of the present disclosure may be prepared, packaged, and/or sold in formulations suitable for pulmonary administration. In some embodiments, such administration is via the buccal cavity. In some embodiments, formulations may comprise dry particles comprising active ingredients. In such embodiments, dry particles may have a diameter in the range from about 0.5 nm to about 7 nm or from about 1 nm to about 6 nm. In some embodiments, formulations may be in the form of dry powders for administration using devices comprising dry powder reservoirs to which streams of propellant may be directed to disperse such powder. In some embodiments, self-propelling solvent/powder dispensing containers may be used. In such embodiments, active ingredients may be dissolved and/or suspended in low-boiling propellant in sealed containers. Such powders may comprise particles wherein at least 98% of the particles by weight have diameters greater than 0.5 nm and at least 95% of the particles by number have diameters less than 7 nm. Alternatively, at least 95% of the particles by weight have a diameter greater than 1 nm and at least 90% of the particles by number have a diameter less than 6 nm. Dry powder compositions may include a solid fine powder diluent such as sugar and are conveniently provided in a unit dose form.

[0499] Low boiling propellants generally include liquid propellants having a boiling point of below 65° F. at atmospheric pressure. Generally, propellants may constitute 50% to 99.9% (w/w) of the composition, and active ingredient may constitute 0.1% to 20% (w/w) of the composition. Propellants may further comprise additional ingredients such as liquid non-ionic and/or solid anionic surfactant and/or solid diluent (which may have particle sizes of the same order as particles comprising active ingredients).

[0500] Pharmaceutical compositions formulated for pulmonary delivery may provide active ingredients in the form of droplets of solution and/or suspension. Such formulations may be prepared, packaged, and/or sold as aqueous and/or dilute alcoholic solutions and/or suspensions, optionally sterile, comprising active ingredients, and may conveniently be administered using any nebulization and/or atomization device. Such formulations may further comprise one or more additional ingredients including, but not limited to, a flavoring agent such as saccharin sodium, a volatile oil, a buffering agent, a surface active agent, and/or a preservative such as methylhydroxybenzoate. Droplets provided by this route of administration may have an average diameter in the range from about 0.1 nm to about 200 nm.

### Ophthalmic or Otic Administration

[0501] In some embodiments, pharmaceutical compositions, AAV particles of the present disclosure may be prepared, packaged, and/or sold in formulations suitable for ophthalmic and/or otic administration. Such formulations may, for example, be in the form of eye and/or ear drops including, for example, a 0.1/1.0% (w/w) solution and/or suspension of the active ingredient in aqueous and/or oily liquid excipients. Such drops may further comprise buffering agents, salts, and/or one or more other of any additional ingredients described herein. Other ophthalmically-administrable formulations which are useful include those which comprise active ingredients in microcrystalline form and/or in liposomal preparations. Subretinal inserts may also be used as forms of administration.

### Delivery, Dose and Regimen

[0502] The present disclosure provides methods of administering AAV particles to a subject in need thereof. The pharmaceutical, diagnostic, or prophylactic AAV particles and compositions of the present disclosure may be administered to a subject using any amount and any route of administration effective for preventing, treating, managing, or diagnosing diseases, disorders and/or conditions. The exact amount required will vary from subject to subject, depending on the species, age, and general condition of the subject, the severity of the disease, the particular composition, its mode of administration, its mode of activity, and the like. The subject may be a human, a mammal, or an animal. Compositions in accordance with the disclosure are typically formulated in unit dosage form for ease of administration and uniformity of dosage. It will be understood, however, that the total daily usage of the compositions of the present disclosure may be decided by the attending physician within the scope of sound medical judgment. The specific therapeutically effective, prophylactically effective, or appropriate diagnostic dose level for any particular individual will depend upon a variety of factors including the disorder being treated and the severity of the disorder; the activity of the specific payload employed; the specific composition employed; the age, body weight, general health, sex and diet of the patient; the time of administration, route of administration, and rate of excretion of the specific AAV particle employed; the duration of the treatment; drugs used in combination or coincidental with the specific AAV particle employed; and like factors well known in the medical arts.

[0503] In one embodiment, delivery of the AAV particles as described herein results in minimal serious adverse events (SAEs) as a result of the delivery of the AAV particles.

[0504] In one embodiment, the AAV particle may be delivered in a multi-dose regimen. The multi-dose regimen may be 2, 3, 4, 5, 6, 7, 8, 9, 10 or more than 10 doses.

[0505] In one embodiment, the AAV particle may be delivered to a subject via a multi-site route of administration. A subject may be administered the AAV particle at 2, 3, 4, 5 or more than 5 sites.

[0506] In certain embodiments, AAV particle pharmaceutical compositions in accordance with the present disclosure may be administered at dosage levels sufficient to deliver from about 0.0001 mg/kg to about 100 mg/kg, from about 0.001 mg/kg to about 0.05 mg/kg, from about 0.005 mg/kg to about 0.05 mg/kg, from about 0.001 mg/kg to about 0.005 mg/kg, from about 0.05 mg/kg to about 0.5 mg/kg, from about 0.01 mg/kg to about 50 mg/kg, from about 0.1 mg/kg to about 40 mg/kg, from about 0.5 mg/kg to about 30 mg/kg, from about 0.01 mg/kg to about 10 mg/kg, from about 0.1 mg/kg to about 10 mg/kg, or from about 1 mg/kg to about 25 mg/kg, of subject body weight per day, one or more times a day, to obtain the desired therapeutic, diagnostic, or prophylactic, effect. It will be understood that the above dosing concentrations may be converted to vg or viral genomes per kg or into total viral genomes administered by one of skill in the art.

[0507] In certain embodiments, AAV particle pharmaceutical compositions in accordance with the present disclosure may be administered at about 10 to about 600 μl/site, 50 to about 500 μl/site, 100 to about 400 μl/site, 120 to about 300 μl/site, 140 to about 200 μl/site, about 160 μl/site. As non-limiting examples, AAV particles may be administered at 50 μl/site and/or 150 μl/site.

[0508] In one embodiment, delivery of the compositions in accordance with the present disclosure to cells comprises a rate of delivery defined by [VG/hour=mL/hour*VG/mL] wherein VG is viral genomes. VG/mL is composition concentration, and mL/hour is rate of prolonged delivery.

[0509] In one embodiment, delivery of compositions comprising the AAV particles in accordance with the present disclosure to cells may comprise a total concentration per subject between about 1×10⁶ VG (Viral Genome) and about 1×10¹⁶ VG. In some embodiments, delivery may comprise a composition concentration of about 1×10⁶, 2×10⁶, 3×10⁶, 4×10⁶, 5×10⁶, 6×10⁶, 7×10⁶, 8×10⁶, 9×10⁶, 1×10⁷, 2×10⁷, 3×10⁷, 4×10⁷, 4×10⁷, 5×10⁷, 6×10⁷, 7×10⁷, 8×10⁷, 9×10⁷, 1×10⁸, 2×10⁸, 3×10⁸, 4×10⁸, 5×10⁸, 6×10⁸, 7×10⁸, 8×10⁸, 9×10⁸, 1×10⁹, 2×10⁹, 3×10⁹, 4×10⁹, 5×10⁹, 6×10⁹, 7×10⁹, 8×10⁹, 9×10⁹, 1×10¹⁰, 2×10¹⁰, 3×10¹⁰, 4×10¹⁰, 5×10¹⁰, 6×10¹⁰, 7×10¹⁰, 8×110, 9×10¹⁰, 1×10¹¹, 2×10¹¹, 2.1×10¹¹, 2.2×10¹¹, 2.3×10¹¹, 2.4×10¹¹, 2.5×10¹¹, 2.6×10¹¹, 2.7×10¹¹, 2.8×10¹¹, 2.9×10¹¹, 3×10¹¹, 4×10¹¹, 5×10¹¹, 6×10¹¹, 7×10¹¹, 7.1×10¹¹, 7.2×10¹¹, 7.3×10¹¹, 7.4×10¹¹, 7.5×10¹¹, 7.6×10¹¹, 7.7×10¹¹, 7.8×10¹¹, 7.9×10¹⁰, 8×10¹¹, 9×10¹¹, 1×10¹², 1.1×10¹², 1.2×10¹², 1.3×10¹¹, 1.4×10¹², 1.5×10¹², 1.6×10¹², 1.7×10¹², 1.8×10¹², 1.9×10¹², 2×10¹², 3×10¹², 4×10¹², 4.1×10¹², 4.2×10¹², 4.3×10¹², 4.4×10¹², 4.5×10¹², 4.6×10¹², 4.7×10¹², 4.8×10¹², 4.9×10¹², 5×10¹², 6×10¹², 6.1×10¹², 6.2×10¹², 6.3×10¹², 6.4×10¹², 6.5×10¹², 6.6×10¹², 6.7×10¹², 6.8×10¹², 6.9×10¹², 7×10¹², 8×10¹², 8.1×10¹², 8.2×10¹², 8.3×10¹², 8.4×10¹², 8.5×10¹², 8.6×10¹², 8.7×10¹², 8.8×10¹², 8.9×10¹², 9×10¹², 1×10¹², 2×10¹², 3×10¹², 4×10¹², 5×10¹³, 6×10¹³, 6.7×10¹³, 7×10¹³, 8×10¹³, 9×10¹³, 1×10¹⁴, 2×10¹⁴, 3×10¹⁴, 4×10¹⁴, 5×10¹⁴, 6×10¹⁴, 7×10¹⁴, 8×10¹⁴, 9×10¹⁴, 1×10¹⁴, 2×10¹⁵, 3×10¹⁵, 4×10¹⁵, 5×10¹⁵, 6×10¹⁵, 7×10¹⁵, 8×10¹⁵, 9×10¹⁵ or 1×10¹⁶ VG/subject.

[0510] In one embodiment, delivery of compositions comprising the AAV particles in accordance with the present disclosure to cells may comprise a total concentration per subject between about 1×10⁶ VG/kg and about 1×10¹⁶ VG/kg. In some embodiments, delivery may comprise a composition concentration of about 1×10⁶, 2×10⁶ 3×10⁶, 4×10⁶, 5×10⁶, 6×10⁶, 7×10⁶, 8×10⁶, 9×10⁶, 1×10⁷, 2×10⁷, 3×10⁷, 4×10⁷, 5×10⁷, 6×10⁷, 7×10⁷, 8×10⁷, 9×10⁷, 1×10⁸, 2×10⁸, 3×10⁸, 4×10⁸, 5×10⁸, 6×10⁸, 7×10⁸, 8×10⁸, 9×10⁸, 1×10⁹, 2×10⁹, 3×10⁹, 4×10⁹ 5×10⁹, 6×10⁹, 7×10⁹, 8×10⁹, 9×10⁹, 1×10¹⁰, 2×10¹⁰, 3×10¹⁰, 4×10¹⁰, 5×10¹⁰, 6×10¹⁰, 7×10, W8×10¹⁰, 9×10¹⁰, 1×10¹¹, 1.1×10¹¹, 1.2×10¹¹, 1.3×10¹¹, 1.4×10¹¹, 1.5×10¹¹, 1.6×10¹¹, 1.7×10¹¹, 1.8×10¹¹, 1.9×10¹¹, 2×10¹¹, 2.1×10¹¹, 2.2×10¹¹, 2.3×10¹¹, 2.4×10¹¹, 2.5×10¹¹, 2.6×10¹¹, 2.7×10¹¹, 2.8×10¹¹, 2.9×10¹¹, 3×10¹¹, 4×10¹¹, 5×10¹¹, 6×10¹¹, 7×10¹¹, 7.1×10¹¹, 7.2×10¹¹, 7.3×10¹¹, 7.4×10¹¹, 7.5×10¹¹, 7.6×10¹¹, 7.7×10¹¹, 7.8×10¹¹, 7.9×10¹¹, 8×10¹¹, 9×10¹¹, 1×10¹², 1.1×10¹², 1.2×10¹², 1.3×10¹¹, 1.4×10¹², 1.5×10¹², 1.6×10¹², 1.7×10¹², 1.8×10¹², 1.9×10¹², 2×10¹², 3×10¹², 4×10¹², 4.1×10¹², 4.2×10¹², 4.3×10¹², 4.4×10¹², 4.5×10¹², 4.6×10¹²4.7×10¹², 4.8×10¹². 4.9×10¹², 5×10¹², 6×10¹², 6.1×10¹², 6.2×10¹², 6.3×10¹², 6.4×10¹², 6.5×10¹², 6.6×10¹², 6.7×10¹², 6.8×10¹², 6.9×10¹², 7×10¹², 8×10¹², 8.1×10¹², 8.2×10¹², 8.3×10¹², 8.4×10¹², 8.5×10¹², 8.6×10¹², 8.7×10¹², 8.8×10¹², 8.9×10¹², 9×10¹², 1×10¹³, 1.1×10¹³, 1.2×10¹³, 1.3×10¹³, 1.4×10¹³, 1.5×10¹³, 1.6×10¹³, 0.7×10¹³, 1.8×10¹³, 1.9×10¹³, 2×10¹³, 2.1×10¹³, 2.2×10¹³, 2.3×10¹³, 2.4×10¹³, 2.5×10¹³, 2.6×10¹³, 2.7×10¹³, 2.8×10¹³, 2.9×10¹³, 3×10¹³, 4×10¹³, 4.1×10¹³, 4.2×10¹³, 4.3×10¹³, 4.4×10¹³, 4.5×10¹³, 4.6×10¹³, 4.7×10¹³, 4.8×10¹³, 4.9×10¹³, 5×10¹³, 6×10¹³, 6.7×10¹³. 7×10¹³, 8×10¹³, 9×10¹³, 1×10¹⁴, 1.1×10¹⁴, 1.2×10¹⁴, 1.3×10¹⁴ 1.4×10¹⁴, 1.5×10¹⁴, 1.6×10¹⁴, 1.7×10¹⁴, 1.8×10¹⁴, 1.9×10¹⁴, 2×10¹⁴, 3×10¹⁴, 4×10¹⁴, 5×10¹⁴, 6×10¹⁴, 7×10¹⁴ 8×10¹⁴, 9×10¹⁴, 1×10¹⁵, 2×10¹⁵, 3×10¹⁵, 4×10¹⁵, 5×10¹⁵, 6×10¹⁵, 7×10¹⁵, 8×10¹⁵, 9×10¹⁵, or 1×10¹⁶ VG/kg. In one embodiment, the delivery comprises a composition concentration of 3×10¹¹ VG/kg. In one embodiment, the delivery comprises a composition concentration of 1×10¹² VG/kg. In one embodiment, the delivery comprises a composition concentration of 2.1×10¹² VG/kg. In one embodiment, the delivery comprises a composition concentration of 3×10¹² VG/kg. In one embodiment, the delivery comprises a composition concentration of 6.3×10¹² VG/kg. In one embodiment, the delivery comprises a composition concentration of 6.7×10¹² VG/kg. In one embodiment, the delivery comprises a composition concentration of 7×10¹² VG/kg. In one embodiment, the delivery comprises a composition concentration of 1×10¹³ VG/kg. In one embodiment, the delivery comprises a composition concentration of 2×10¹³ VG/kg. In one embodiment, the delivery comprises a composition concentration of 3×10¹³ VG/kg. In one embodiment, the delivery comprises a composition concentration of 4.9×10¹³ VG/kg. In one embodiment, the delivery comprises a composition concentration of 1.2×10¹⁴ VG/kg. In one embodiment, the delivery comprises a composition concentration of 1×10¹² VG/kg to 1.5×10¹⁴ VG/kg. In one embodiment, the delivery comprises a composition concentration of 1×10¹² VG/kg 1.5×10¹² VG/kg. In one embodiment, the delivery comprises a composition concentration of 1.5×10¹³ VG/kg to 2.5×10¹³ VG/kg. In one embodiment, the delivery comprises a composition concentration of 4×10¹³ VG/kg to 5×10¹³ VG/kg. In one embodiment, the delivery comprises a composition concentration of 1×10¹² VG/kg to 1.5×10¹⁴ VG/kg. In one embodiment, the delivery comprises a composition concentration of 6.3×10¹¹ VG/kg to 1.2×10¹⁴ VG/kg.

[0511] In one embodiment, delivery of AAV particles to cells of the central nervous system (e.g., parenchyma) may comprise a total dose between about 1×10⁶ VG and about 1×10¹⁶ VG. In some embodiments, delivery may comprise a total dose of about 1×10⁶, 2×10⁶, 3×10⁶, 4×10⁶, 5×10⁶, 6×10⁶, 7×10⁶, 8×10⁶, 9×10⁶, 1×10⁷, 2×10⁷, 3×10⁷, 4×10⁷, 5×10⁷, 6×10⁷, 7×10⁷, 8×10⁷, 9×10⁷, 1×10⁸, 2×10⁸, 3×10⁸, 4×10⁸, 5×10⁸, 6×10⁸, 7×10⁸, 8×10⁸, 9×10⁸, 1×10⁹, 2×10⁹, 3×10⁹, 4×10⁹, 5×10⁹, 6×10⁹, 7×10⁹, 8×10⁹, 9×10⁹, 1×10¹⁰, 1.9×10¹⁰, 2×10¹⁰, 3×10¹⁰, 3.73×10¹⁰, 4×10¹⁰, 5×10¹⁰, 6×10¹⁰, 7×10¹⁰, 8×10¹⁰, 9×10¹⁰, 1×10¹¹, 2×10¹¹, 2.5×10¹¹, 3×10¹¹, 4×10¹¹, 5×10¹¹, 6×10¹¹, 7×10¹¹, 8×10¹¹, 9×10¹⁰, 1×10¹², 2×10¹², 3×10¹², 4×10¹², 5×10¹², 6×10¹², 6.1×10¹², 6.2×10¹², 6.3×10¹², 6.4×10¹², 6.5×10¹², 6.6×10¹², 6.7×10¹², 6.8×10¹², 6.9×10¹², 7×10¹², 8×10¹², 9×10¹², 1×10¹³, 2×10¹³, 3×10¹³, 4×10¹³, 5×10¹³, 6×10¹³, 7×10¹³, 8×10¹³, 9×10¹³, 1×10¹⁴, 2×10¹⁴, 3×10¹⁴, 4×10¹⁴, 5×10¹⁴, 6×10¹⁴, 7×10¹⁴, 8×10¹⁴, 9×10¹⁴, 1×10¹⁵, 2×10¹⁵, 3×10¹⁵, 4×10¹⁵, 5×10¹⁵, 6×10¹⁵, 7×10¹⁵, 8×10¹⁵, 9×10¹⁵, or 1×10¹⁶ VG. As a non-limiting example, the total dose is 1×10¹³ VG. As another non-limiting example, the total dose is 2.1×10¹² VG. As another non-limiting example, the total dose is 6.3×10¹² VG.

[0512] In one embodiment, about 105 to 10⁶ viral genome (unit) may be administered per dose.

[0513] In one embodiment, delivery of the compositions comprising the AAV particles in accordance with the present disclosure to cells may comprise a total concentration between about 1×10⁶ VG/mL and about 1×10¹⁶ VG/mL. In some embodiments, delivery may comprise a composition concentration of about 1×10⁶, 2×10⁶, 3×10⁶, 4×10⁶, 5×10⁶, 6×10⁶, 7×10⁶, 8×10⁶, 9×10⁶, 1×10⁷, 2×10⁷, 3×10⁷, 4×10⁷, 5×10⁷, 6×10⁷, 7×10⁷, 8×10⁷, 9×10⁷, 1×10⁸, 2×10⁸, 3×10⁸, 4×10⁸, 5×10⁸, 6×10⁸, 7×10⁸, 8×10⁸, 9×10⁸, 1×10⁹, 2×10⁹, 3×10⁹, 4×10⁹, 5×10⁹, 6×10⁹, 7×10⁹, 8×10⁹, 9×10⁹, 1×10¹⁰, 2×10¹⁰, 3×10¹⁰, 4×10¹⁰, 5×10¹⁰, 6×10¹⁰, 7×10¹⁰, 8×10¹⁰, 9×10¹⁰, 1×10¹¹, 1.1×10¹¹, 1.2×10¹¹, 1.3×10¹¹, 1.4×10¹¹, 1.5×10¹¹, 1.6×10¹¹, 1.7×10¹¹, 1.8×10¹¹, 1.9×10¹¹, 2×10¹¹, 2.1×10¹¹, 2.2×10¹¹, 2.3×10¹¹, 2.4×10¹¹, 2.5×10¹¹, 2.6×10¹¹, 2.7×10¹¹, 2.8×10¹¹, 2.9×10¹¹, 3×10¹¹, 4×10¹¹, 5×10¹¹, 6×10¹¹, 7×10¹¹, 7.1×10¹¹, 7.2×10¹¹, 7.3×10¹¹, 7.4×10¹¹, 7.5×10¹¹, 7.6×10¹¹, 7.7×10¹¹, 7.8×10¹¹, 7.9×10¹¹, 8×10¹¹, 9×10¹¹, 1×10¹², 1.1×10¹², 1.2×10¹², 1.3×10¹², 1.4×10¹², 1.5×10¹², 1.6×10¹², 1.7×10¹², 1.8×10¹², 0.9×10¹², 2×10¹², 3×10¹², 4×10¹², 4.1×10¹², 4.2×10¹², 4.3×10¹², 4.4×10¹², 4.5×10¹²4.6×10¹², 4.7×10¹², 4.8×10¹², 4.9×10¹², 5×10¹², 6×10¹², 6.1×10¹², 6.2×10¹², 6.3×10¹², 6.4×10¹², 6.5×10¹², 6.6×10¹², 6.7×10¹², 6.8×10¹². 6.9×10¹², 7×10¹², 8×10¹², 8.1×10¹², 8.2×10¹², 8.3×10¹², 8.4×10¹², 8.5×10¹², 8.6×10¹², 8.7×10¹², 8.8×10¹², 8.9×10¹², 9×10¹², 1×10¹³, 1.1×10¹³, 1.2×10¹³, 1.3×10¹³, 1.4×10¹³, 1.5×10¹³, 1.6×10¹³, 1.7×10¹³, 1.8×10¹³, 1.9×10¹³, 2×10¹³, 2.1×10¹³, 2.2×10¹³, 2.3×10¹³, 2.4×10¹³, 2.5×10¹³, 2.6×10¹³, 2.7×10¹³, 2.8×10¹³, 2.9×10¹³, 3×10¹³, 4×10¹³, 4.1×10¹³, 4.2×10¹³, 4.3×10¹³, 4.4×10¹³, 4.5×10¹³, 4.6×10¹³, 4.7×10¹³, 4.8×10¹³, 4.9×10¹³, 5×10¹³, 6×10¹³, 6.7×10¹³, 7×10¹³, 8×10¹³, 9×10¹³, 1×10¹⁴, 1.0×10¹⁴ 1.2×10¹⁴, 1.3×10¹⁴, 1.4×10¹⁴, 1.5×10¹⁴, 1.6×10¹³, 1.7×10¹³, 1.8×10¹³, 1.9×10¹³, 2×10¹⁴, 3×10¹⁴, 4×10¹⁴, 5×10¹⁴, 6×10¹⁴, 7×10¹⁴, 8×10¹⁴, 9×10¹⁴, 1×10¹⁵, 2×10¹⁵, 3×10¹⁵, 4×10¹⁵, 5×10¹⁵, 6×10¹⁵, 7×10¹⁵, 8×10¹⁵, 9×10¹⁵, or 1×10¹⁶ VG/kg. In one embodiment, the delivery comprises a composition concentration of 3×10¹¹ VG/kg. In one embodiment, the delivery comprises a composition concentration of 1×10¹² VG/kg. In one embodiment, the delivery comprises a composition concentration of 2.1×10¹² VG/kg. In one embodiment, the delivery comprises a composition concentration of 3×10¹² VG/kg. In one embodiment, the delivery comprises a composition concentration of 6.3×10¹² VG/kg. In one embodiment, the delivery comprises a composition concentration of 6.7×10¹² VG/kg. In one embodiment, the delivery comprises a composition concentration of 7×10¹² VG/kg. In one embodiment, the delivery comprises a composition concentration of 1×10¹³ VG/kg. In one embodiment, the delivery comprises a composition concentration of 2×10¹³ VG/kg. In one embodiment, the delivery comprises a composition concentration of 3×10¹³ VG/kg. In one embodiment, the delivery comprises a composition concentration of 4.9×10¹³ VG/kg. In one embodiment, the delivery comprises a composition concentration of 1.2×10¹⁴ VG/kg. In one embodiment, the delivery comprises a composition concentration of 1×10¹² VG/kg to 1.5×10¹⁴ VG/kg. In one embodiment, the delivery comprises a composition concentration of 1×10¹² VG/kg 1.5×10¹² VG/kg. In one embodiment, the delivery comprises a composition concentration of 1.5×10¹³ VG/kg to 2.5×10¹³ VG/kg. In one embodiment, the delivery comprises a composition concentration of 4×10¹³ VG/kg to 5×10¹³ VG/kg. In one embodiment, the delivery comprises a composition concentration of 1×10¹⁴ VG/kg to 1.5×10¹⁴ VG/kg. In one embodiment, the delivery comprises a composition concentration of 6.3×10¹⁴ VG/kg to 1.2×10¹⁴ VG/kg.

[0514] In one embodiment, delivery of AAV particles to cells of the central nervous system (e.g., parenchyma) may comprise a composition concentration between about 1×10⁶ VG/mL and about 1×10¹⁶ VG/mL. In some embodiments, delivery may comprise a composition concentration of about 1×10⁶, 2×10⁶, 3×10⁶, 4×10⁶, 5×10⁶, 6×10⁶, 7×10⁶, 8×10⁶, 9×10⁶, 1×10⁷, 2×10⁷, 3×10⁷, 4×10⁷, 5×10⁷, 6×10⁷, 7×10⁷, 8×10⁷. 9×10⁷, 1×10⁸, 2×10⁸, 3×10⁸, 4×10⁸, 5×10⁸, 6×10⁸, 7×10⁸, 8×10⁸, 9×10⁸, 1×10⁹, 2×10⁹, 3×10⁹, 4×10⁹, 5×10⁹, 6×10⁹, 7×10⁹, 8×10⁹, 9×10⁹, 1×10¹⁰, 2×10¹⁰, 3×10¹⁰, 4×10¹⁰, 5×10¹⁰, 6×10¹⁰, 7×10¹⁰, 8×10¹⁰, 9×10¹⁰, 1×10¹¹, 1.1×10¹¹, 1.2×10¹¹, 1.3×10¹¹, 1.4×10¹¹, 1.5×10¹¹, 0.6×10¹¹, 1.7×10¹¹, 1.8×10¹¹, 1.9×10¹¹, 2×10¹¹, 2.1×10¹¹, 2.2×10¹¹, 2.3×10¹¹, 2.4×10¹¹, 2.5×10¹¹, 2.6×10¹¹, 2.7×10¹¹, 2.8×10¹¹, 2.9×10¹¹, 3×10¹¹, 4×10¹¹, 5×10¹¹, 6×10¹¹, 7×10¹¹, 7.1×10¹¹, 7.2×10¹¹, 7.3×10¹¹, 7.4×10¹¹, 7.5×10¹¹, 7.6×10¹¹, 7.7×10¹¹, 7.8×10¹¹, 7.9×10¹¹, 8×10¹¹, 9×10¹¹, 1×10¹², 1.1×10¹², 1.2×10¹², 1.3×10¹², 1.4×10¹², 1.5×10¹², 1.6×10¹², 1.7×10¹², 1.8×10¹², 1.9×10¹², 2×10¹², 3×10¹², 4×10¹², 4.1×10¹², 4.2×10¹², 4.3×10¹², 4.4×10¹², 4.5×10¹², 4.6×10¹², 4.7×10¹², 4.8×10¹², 4.9×10¹², 5×10¹², 6×10¹², 6.1×10¹², 6.2×10-, 6.3×10¹², 6.4×10¹², 6.5×10¹², 6.6×10¹², 6.7×10¹², 6.8×10¹², 6.9×10¹², 7×10¹², 8×10¹², 8.1×10¹², 8.2×10¹², 8.3×10¹², 8.4×10¹², 8.5×10¹², 8.6×10¹², 8.7×10¹², 8.8×10¹², 8.9×10¹², 9×10¹², 1×10¹³, 1.1×10¹³, 1.2×10¹³, 1.3×10¹³, 1.4×10¹³, 1.5×10¹³, 1.6×10¹³, 1.7×10¹³, 1.8×10¹³, 1.9×10¹³, 2×10¹³, 2.1×10¹³, 2.2×10¹³, 2.3×10¹³, 2.4×10¹¹, 2.5×10¹³, 2.6×10¹³, 2.7×10¹³, 2.8×10¹³, 2.9×10¹³, 3×10¹³, 4×10¹³, 4.1×10¹³, 4.2×10¹³, 4.3×10¹³, 4.4×10¹³, 4.5×10¹³, 4.6×10¹³, 4.7×10¹³, 4.8×10¹³, 4.9×10¹³, 5×10¹³, 6×10¹³, 6.7×10¹³, 7×10¹³, 8×10¹³, 9×10¹³, 1×10¹⁴, 1.1×10¹⁴, 1.2×10¹⁴, 1.3×10¹⁴, 1.4×10¹⁴, 1.5×10¹⁴, 1.6×10¹³, 1.7×10¹³, 1.8×10¹³, 1.9×10¹³, 2×10¹⁴, 3×10¹⁴, 4×10¹⁴, 5×10¹⁴, 6×10¹⁴, 7×10¹⁴, 8×10¹⁴, 9×10¹⁴, 1×10¹⁵, 2×10¹⁵, 3×10¹⁵, 4×10¹⁵, 5×10¹⁵, 6×10¹⁵, 7×10¹⁵, 8×10¹⁵, 9×10¹⁵, or 1×10¹⁶ VG/kg. In one embodiment, the delivery comprises a composition concentration of 3×10¹¹ VG/kg. In one embodiment, the delivery comprises a composition concentration of 1×10¹² VG/kg. In one embodiment, the delivery comprises a composition concentration of 2.1×10¹² VG/kg. In one embodiment, the delivery comprises a composition concentration of 3×10¹² VG/kg. In one embodiment, the delivery comprises a composition concentration of 6.3×10¹² VG/kg. In one embodiment, the delivery comprises a composition concentration of 6.7×10¹² VG/kg. In one embodiment, the delivery comprises a composition concentration of 7×10¹² VG/kg. In one embodiment, the delivery comprises a composition concentration of 1×10¹³ VG/kg. In one embodiment, the delivery comprises a composition concentration of 2×10¹³ VG/kg. In one embodiment, the delivery comprises a composition concentration of 3×10¹³ VG/kg. In one embodiment, the delivery comprises a composition concentration of 4.9×10¹³ VG/kg. In one embodiment, the delivery comprises a composition concentration of 1.2×10¹⁴ VG/kg. In one embodiment, the delivery comprises a composition concentration of 1×10¹² VG/kg to 1.5×10¹⁴ VG/kg. In one embodiment, the delivery comprises a composition concentration of 1×10¹² VG/kg 1.5×10¹² VG/kg. In one embodiment, the delivery comprises a composition concentration of 1.5×10¹³ VG/kg to 2.5×10¹³ VG/kg. In one embodiment, the delivery comprises a composition concentration of 4×10¹³ VG/kg to 5×10¹³ VG/kg. In one embodiment, the delivery comprises a composition concentration of 1×10¹⁴ VG/kg to 1.5×10¹⁴ VG/kg. In one embodiment, the delivery comprises a composition concentration of 6.3×10¹¹ VG/kg to 1.2×10¹⁴ VG/kg.

[0515] In certain embodiments, the desired dosage may be delivered using multiple administrations (e.g., two, three, four, five, six, seven, eight, nine, ten, eleven, twelve, thirteen, fourteen, or more administrations). When multiple administrations are employed, split dosing regimens such as those described herein may be used. As used herein, a “split dose” is the division of “single unit dose” or total daily dose into two or more doses, e.g., two or more administrations of the “single unit dose”. As used herein, a “single unit dose” is a dose of any therapeutic administered in one dose/at one time/single route/single point of contact, i.e., single administration event.

[0516] The desired dosage of the AAV particles of the present disclosure may be administered as a “pulse dose” or as a “continuous flow”. As used herein, a “pulse dose” is a series of single unit doses of any therapeutic administered with a set frequency over a period of time. As used herein, a “continuous flow” is a dose of therapeutic administered continuously for a period of time in a single route/single point of contact, i.e., continuous administration event. A total daily dose, an amount given or prescribed in 24 hour period, may be administered by any of these methods, or as a combination of these methods, or by any other methods suitable for a pharmaceutical administration.

[0517] In one embodiment, delivery of the AAV particles of the present disclosure to a subject provides regulating activity of a target gene in a subject. The regulating activity may be an increase in the production of the target protein in a subject or the decrease of the production of target protein in a subject. The regulating activity can be for at least 1 month, 2 months, 3 months, 4 months, 5 months, 6 months, 7 months, 8 months, 9 months, 10 months, 11 months, 1 year, 13 months, 14 months, 15 months, 16 months, 17 months, 18 months, 19 months, 20 months, 20 months, 21 months, 22 months, 23 months, 2 years, 3 years, 4 years, 5 years, 6 years, 7 years, 8 years, 9 years, 10 years or more than 10 years.

[0518] In some embodiments, the AAV particle of the present disclosure may be administered to a subject using a single dose, one-time treatment. The dose of the one-time treatment may be administered by any methods known in the art and/or described herein. As used herein, a “one-time treatment” refers to a composition which is only administered one time. If needed, a booster dose may be administered to the subject to ensure the appropriate efficacy is reached. A booster may be administered 1 month, 2 months, 3 months, 4 months, 5 months, 6 months, 7 months, 8 months, 9 months, 10 months, 11 months, 12 months, 1 year, 13 months, 14 months, 15 months, 16 months, 17 months, 18 months, 19 months, 20 months, 21 months, 22 months, 23 months, 24 months, 2 years, 3 years, 4 years, 5 years, 6 years, 7 years, 8 years, 9 years, 10 years, or more than 10 years after the one-time treatment.

### Delivery Methods

[0519] In one embodiment, the AAV particles or pharmaceutical compositions of the present disclosure may be administered or delivered using the methods for treatment of disease described in U.S. Pat. No. 8,999,948, or International Publication No. WO2014178863, the contents of each of which are herein incorporated by reference in their entirety.

[0520] In one embodiment, the AAV particles or pharmaceutical compositions of the present disclosure may be administered or delivered using the methods for delivering gene therapy in Alzheimer's Disease or other neurodegenerative conditions as described in US Patent Application Publication No. 20150126590, the contents of which are herein incorporated by reference in their entirety.

[0521] In one embodiment, the AAV particles or pharmaceutical compositions of the present disclosure may be administered or delivered using the methods for delivery of a CNS gene therapy as described in U.S. Pat. Nos. 6,436,708, and 8,946,152, and International Publication No. WO2015168666, the contents of each of which are herein incorporated by reference in their entirety.

[0522] In one embodiment, the AAV particle or pharmaceutical compositions of the present disclosure may be administered or delivered using the methods for delivering proteins using AAV particles described in European Patent Application No. EP2678433, the contents of which are herein incorporated by reference in their entirety.

[0523] In one embodiment, the AAV particle or pharmaceutical compositions of the present disclosure may be administered or delivered using the methods for delivering DNA to the bloodstream described in U.S. Pat. No. 6,211,163, the contents of which are herein incorporated by reference in their entirety.

[0524] In one embodiment, the AAV particle or pharmaceutical compositions of the present disclosure may be administered or delivered using the methods for delivering a payload to the central nervous system described in U.S. Pat. No. 7,588,757, the contents of which are herein incorporated by reference in their entirety.

[0525] In one embodiment, the AAV particle or pharmaceutical compositions of the present disclosure may be administered or delivered using the methods for delivering a payload described in U.S. Pat. No. 8,283,151, the contents of which are herein incorporated by reference in their entirety.

[0526] In one embodiment, the AAV particle or pharmaceutical compositions of the present disclosure may be administered or delivered using the methods for delivering a payload using a glutamic acid decarboxylase (GAD) delivery vector described in International Patent Publication No. WO2001089583, the contents of which are herein incorporated by reference in their entirety.

[0527] In one embodiment, the AAV particle or pharmaceutical compositions of the present disclosure may be administered or delivered using the methods for delivering a payload to neural cells described in International Patent Publication No. WO2012057363, the contents of which are herein incorporated by reference in their entirety.

### Delivery to Cells

[0528] The present disclosure provides a method of delivering to a cell or tissue or organ any of the above-described AAV particles, comprising contacting the cell or tissue or organ with said AAV particle or contacting the cell or tissue or organ with a formulation comprising said AAV particle, or contacting the cell or tissue with any of the described compositions, including pharmaceutical compositions comprising the AAV particles. The method of delivering the AAV particle to a cell or tissue or organ can be accomplished in vitro, ex vivo, or in vivo.

### Delivery to Subjects

[0529] The present disclosure additionally provides a method of delivering to a subject, including a mammalian subject, any of the above-described AAV particles comprising administering to the subject said AAV particle, or administering to the subject a formulation comprising said AAV particle, or administering to the subject any of the described compositions, including pharmaceutical compositions.

[0530] In one embodiment, the mammalian subject is human. In some aspects, the human subject is a patient with a neurological disease.

### Combinations

[0531] The AAV particles of the present disclosure may be used in combination with one or more other therapeutic, prophylactic, research or diagnostic agents. By “in combination with,” it is not intended to imply that the agents must be administered at the same time and/or formulated for delivery together, although these methods of delivery are within the scope of the present disclosure. Compositions can be administered concurrently with, prior to, or subsequent to, one or more other desired therapeutics or medical procedures. In general, each agent will be administered at a dose and/or on a time schedule determined for that agent. In some embodiments, the present disclosure encompasses the delivery of pharmaceutical, prophylactic, research, or diagnostic compositions in combination with agents that may improve their bioavailability, reduce and/or modify their metabolism, inhibit their excretion, and/or modify their distribution within the body.

### Measurement of Expression

[0532] Expression of payloads from viral genomes may be determined using various methods known in the art such as, but not limited to immunochemistry (e.g., IHC), in situ hybridization (ISH), enzyme-linked immunosorbent assay (ELISA), affinity ELISA, ELISPOT, flow cytometry, immunocytology, surface plasmon resonance analysis, kinetic exclusion assay, liquid chromatography-mass spectrometry (LCMS), high-performance liquid chromatography (HPLC), BCA assay, immunoelectrophoresis, Western blot, SDS-PAGE, protein immunoprecipitation, and/or PCR.

### Bioavailability

[0533] The AAV particles, when formulated into a composition with a delivery agent as described herein, can exhibit an increase in bioavailability as compared to a composition lacking a delivery agent as described herein. As used herein, the term “bioavailability” refers to the systemic availability of a given amount of AAV particle or expressed payload administered to a mammal. Bioavailability can be assessed by measuring the area under the curve (AUC) or the maximum serum or plasma concentration (Cₘₐₓ) of the composition following. AUC is a determination of the area under the curve plotting the serum or plasma concentration of a compound (e.g., AAV particles or expressed payloads) along the ordinate (Y-axis) against time along the abscissa (X-axis). Generally, the AUC for a particular compound can be calculated using methods known to those of ordinary skill in the art and as described in G. S. Banker, Modern Pharmaceutics, Drugs and the Pharmaceutical Sciences, v. 72, Marcel Dekker, New York, Inc., 1996, the contents of which are herein incorporated by reference in their entirety.

[0534] The Cₘₐₓ value is the maximum concentration of the AAV particle or expressed payload achieved in the serum or plasma of a mammal following administration of the AAV particle to the mammal. The Cₘₐₓ value can be measured using methods known to those of ordinary skill in the art. The phrases “increasing bioavailability” or “improving the pharmacokinetics,” as used herein mean that the systemic availability of a first AAV particle or expressed payload, measured as AUC, Cₘₐₓ, or Cₘᵢₙ a mammal is greater, when co-administered with a delivery agent as described herein, than when such co-administration does not take place. In some embodiments, the bioavailability can increase by at least about 2%, at least about 5%, at least about 10%, at least about 15%, at least about 20%, at least about 25%, at least about 30%, at least about 35%, at least about 40%, at least about 45%, at least about 50%, at least about 55%, at least about 60%, at least about 65%, at least about 70%, at least about 75%, at least about 80%, at least about 85%, at least about 90%, at least about 95%, or about 100%.

### Therapeutic Window

[0535] As used herein “therapeutic window” refers to the range of plasma concentrations, or the range of levels of therapeutically active substance at the site of action, with a high probability of eliciting a therapeutic effect. In some embodiments, the therapeutic window of the AAV particle as described herein can increase by at least about 2%, at least about 5%, at least about 10%, at least about 15%, at least about 20%, at least about 25%, at least about 30%, at least about 35%, at least about 40%, at least about 45%, at least about 50%, at least about 55%, at least about 60%, at least about 65%, at least about 70%, at least about 75%, at least about 80%, at least about 85%, at least about 90%, at least about 95%, or about 100%.

### Volume of Distribution

[0536] As used herein, the term “volume of distribution” refers to the fluid volume that would be required to contain the total amount of the drug in the body at the same concentration as in the blood or plasma: V_{dist} equals the amount of drug in the body/concentration of drug in blood or plasma. For example, for a 10 mg dose and a plasma concentration of 10 mg/L, the volume of distribution would be 1 liter. The volume of distribution reflects the extent to which the drug is present in the extravascular tissue. A large volume of distribution reflects the tendency of a compound to bind to the tissue components compared with plasma protein binding. In a clinical setting, V_{dist} can be used to determine a loading dose to achieve a steady state concentration. In some embodiments, the volume of distribution of the AAV particles as described herein can decrease at least about 2%, at least about 5%, at least about 10%, at least about 15%, at least about 20%, at least about 25%, at least about 30%, at least about 35%, at least about 40%, at least about 45%, at least about 50%, at least about 55%, at least about 60%, at least about 65%, at least about 70%.

### Biological Effect

[0537] In one embodiment, the biological effect of the AAV particles delivered to the animals may be categorized by analyzing the payload expression in the animals. The payload expression may be determined from analyzing a biological sample collected from a mammal administered the AAV particles described herein. For example, a protein expression of 50-200 pg/ml for the protein encoded by the AAV particles delivered to the mammal may be seen as a therapeutically effective amount of protein in the mammal.

### IV. METHODS AND USES OF THE COMPOSITIONS

### Gene and Protein Expression

[0538] AAV particles, including compositions comprising the AAV particles of the present disclosure may be used for regulating expression of a gene of interest in a cell, tissue, organ or subject. The AAV particle may comprise a capsid and a viral genome that comprises a payload; the payload may be or include at least one nucleic acid sequence encoding a target protein, or a nucleic acid sequence encoding a siRNA duplex targeting a gene of interest. The AAV particle may have a serotype including a capsid and/or a peptide insert such as but not limited to VOY101, VOY201, VOY801, VOY1101, AAVPHP.B (PHP.B), AAVPHP.A (PHP.A), AAVG2B-26, AAVG2B-13, AAVTH1.1-32, AAVTH1.1-35, AAVPHP.B2 (PHP.B2), AAVPHP.B3 (PHP.B3), AAVPHP.N/PHP.B-DGT, AAVPHP.B-EST, AAVPHP.B-GGT, AAVPHP.B-ATP, AAVPHP.B-ATT-T, AAVPHP.B-DGT-T, AAVPHP.B-GGT-T, AAVPHP.B-SGS, AAVPHP.B-AQP, AAVPHP.B-QQP, AAVPHP.B-SNP(3), AAVPHP.B-SNP, AAVPHP.B-QGT, AAVPHP.B-NQT, AAVPHP.B-EGS, AAVPHP.B-SGN, AAVPHP.B-EGT, AAVPHP.B-DST, AAVPHP.B-DST, AAVPHP.B-STP, AAVPHP.B-PQP, AAVPHP.B-SQP, AAVPHP.B-QLP, AAVPHP.B-TMP, AAVPHP.B-TIP, AAVPHP.S/G2A12, AAVG2A15/G2A3 (G2A3), AAVG2B4 (G2B4), AAVG2B5, PHP.S, AAV1, AAV2, AAV2G9, AAV3, AAV3a, AAV3b, AAV3-3, AAV4, AAV4-4, AAV5, AAV6, AAV6.1, AAV6.2, AAV6.1.2, AAV7, AAV7.2, AAV8, AAV9, AAV9.11, AAV9.13, AAV9.16, AAV9.24, AAV9.45, AAV9.47, AAV9.61, AAV9.68, AAV9.84, AAV9.9, AAV10, AAV11, AAV12, AAV16.3, AAV24.1, AAV27.3, AAV42.12, AAV42-1b, AAV42-2, AAV42-3a, AAV42-3b, AAV42-4, AAV42-5a, AAV42-5b, AAV42-6b, AAV42-8, AAV42-10, AAV42-11, AAV42-12, AAV42-13, AAV42-15, AAV42-aa, AAV43-1, AAV43-12, AAV43-20, AAV43-21, AAV43-23, AAV43-25, AAV43-5, AAV44.1, AAV44.2, AAV44.5, AAV223.1, AAV223.2, AAV223.4, AAV223.5, AAV223.6, AAV223.7, AAV1-7/rh.48, AAV1-8/rh.49, AAV2-15/rh.62, AAV2-3/rh.61, AAV2-4/rh.50, AAV2-5/rh.51, AAV3.1/hu.6, AAV3.1/hu.9, AAV3-9/rh.52, AAV3-11/rh.53, AAV4-8/r11.64, AAV4-9/rh.54, AAV4-19/rh.55, AAV5-3/rh.57, AAV5-22/rh.58, AAV7.3/hu.7, AAV16.8/hu.10, AAV16.12/hu.1, AAV29.3/bb.1, AAV29.5/bb.2, AAV106.1/hu.37, AAV114.3/hu.40, AAV127.2/hu.41, AAV127.5/hu.42, AAV128.3/hu.44, AAV130.4/hu.48, AAV145.1/hu.53, AAV145.5/hu.54, AAV145.6/hu.55, AAV161.10/hu.60, AAV161.6/hu.61, AAV33.12/hu.17, AAV33.4/hu.15, AAV33.8/hu.16, AAV52/hu.19, AAV52.1/hu.20, AAV58.2/hu.25, AAVA3.3, AAVA3.4, AAVA3.5, AAVA3.7, AAVC1, AAVC2, AAVC5, AAV-DJ, AAV-DJ8, AAVF3, AAVF5, AAVH2, AAVrh.72, AAVhu.8, AAVrh.68, AAVrh.70, AAVpi.1. AAVpi.3, AAVpi.2, AAVrh.60, AAVrh.44, AAVrh.65, AAVrh.55, AAVrh.47, AAVrh.69, AAVrh.45, AAVrh.59, AAVhu.12, AAVH6, AAVLK03, AAVH-1/hu.1, AAVH-5/hu.3, AAVLG-10/rh.40, AAVLG-4/rh.38, AAVLG-9/hu.39, AAVN721-8/rh.43, AAVCh.5, AAVCh.5R1, AAVcy.2, AAVcy.3, AAVcy.4, AAVcy.5, AAVCy.5R1, AAVCy.5R2, AAVCy.5R3, AAVCy.5R4, AAVcy.6, AAVhu.1. AAVhu.2, AAVhu.3, AAVhu.4, AAVhu.5, AAVhu.6, AAVhu.7, AAVhu.9, AAVhu.10, AAVhu.11, AAVhu.13, AAVhu.15, AAVhu.16, AAVhu.17. AAVhu.18, AAVhu.20, AAVhu.21, AAVhu.22, AAVhu.23.2, AAVhu.24, AAVhu.25, AAVhu.27, AAVhu.28, AAVhu.29, AAVhu.29R, AAVhu.31, AAVhu.32, AAVhu.34, AAVhu.35. AAVhu.37, AAVhu.39, AAVhu.40, AAVhu.41, AAVhu.42, AAVhu.43, AAVhu.44, AAVhu.44R1, AAVhu.44R2, AAVhu.44R3, AAVhu.45, AAVhu.46, AAVhu.47, AAVhu.48, AAVhu.48R1. AAVhu.48R2. AAVhu.48R3, AAVhu.49, AAVhu.51. AAVhu.52. AAVhu.54, AAVhu.55, AAVhu.56, AAVhu.57, AAVhu.58, AAVhu.60, AAVhu.61, AAVhu.63, AAVhu.64, AAVhu.66, AAVhu.67, AAVhu.14/9, AAVhu.t 19, AAVrh.2, AAVrh.2R. AAVrh.8, AAVrh.8R. AAVrh.10. AAVrh.12, AAVrh.13, AAVrh.13R, AAVrh.14, AAVrh.17, AAVrh.18, AAVrh.19, AAVrh.20. AAVrh.21, AAVrh.22, AAVrh.23, AAVrh.24, AAVrh.25, AAVrh.31. AAVrh.32, AAVrh.33, AAVrh.34, AAVrh.35, AAVrh.36, AAVrh.37, AAVrh.37R2, AAVrh.38, AAVrh.39, AAVrh.40, AAVrh.46, AAVrh.48, AAVrh.48.1, AAVrh.48.1.2, AAVrh.48.2, AAVrh.49, AAVrh.51. AAVrh.52, AAVrh.53, AAVrh.54, AAVrh.56, AAVrh.57, AAVrh.58, AAVrh.61, AAVrh.64, AAVrh.64R1, AAVrh.64R2, AAVrh.67, AAVrh.73, AAVrh.74, AAVrh8R, AAVrh8R A586R mutant, AAVrh8R R533A mutant, AAAV, BAAV, caprine AAV, bovine AAV, AAVhE1.1, AAVhEr1.5, AAVhER1.14, AAVhEr1.8, AAVhEr1.16, AAVhEr1.18, AAVhEr1.35, AAVhEr1.7, AAVhEr1.36, AAVhEr2.29, AAVhEr2.4, AAVhEr2.16, AAVhEr2.30, AAVhEr2.31, AAVhEr2.36, AAVhER1.23, AAVhEr3.1, AAV2.5T, AAV-PAEC, AAV-LK01, AAV-LK02. AAV-LK03, AAV-LK04, AAV-LK05, AAV-LK06, AAV-LK07, AAV-LK08, AAV-LK09, AAV-LK10, AAV-LK11, AAV-LK12, AAV-LK13, AAV-LK14, AAV-LK15, AAV-LK16, AAV-LK17, AAV-LK18, AAV-LK19, AAV-PAEC2, AAV-PAEC4, AAV-PAEC6, AAV-PAEC7, AAV-PAEC8, AAV-PAEC11, AAV-PAEC12, AAV-2-pre-miRNA-101, AAV-8h, AAV-8b, AAV-h, AAV-b, AAV SM 10-2, AAV Shuffle 100-1, AAV Shuffle 100-3, AAV Shuffle 100-7, AAV Shuffle 10-2, AAV Shuffle 10-6, AAV Shuffle 10-8, AAV Shuffle 100-2, AAV SM 10-1, AAV SM 10-8, AAV SM 100-3, AAV SM 100-10, BNP61 AAV, BNP62 AAV, BNP63 AAV, AAVrh.50, AAVrh.43, AAVrh.62, AAVrh.48, AAVhu.19, AAVhu.11, AAVhu.53, AAV4-8/rh.64, AAVLG-9/hu.39. AAV54.5/hu.23, AAV54.2/hu.22, AAV54.7/hu.24, AAV54.1/hu.21, AAV54.4R/hu.27, AAV46.2/hu.28, AAV46.6/hu.29, AAV128.1/hu.43, true type AAV (tAAV). UPENN AAV 10, Japanese AAV10 serotypes, AAV CBr-7.1, AAV CBr-7.10, AAV CBr-7.2, AAV CBr-7.3, AAV CBr-7.4, AAV CBr-7.5, AAV CBr-7.7, AAV CBr-7.8, AAV CBr-B7.3, AAV CBr-B7.4, AAV CBr-E1, AAV CBr-E2, AAV CBr-E3, AAV CBr-E4, AAV CBr-E5, AAV CBr-e5, AAV CBr-E6, AAV CBr-E7, AAV CBr-E8, AAV CHt-1 AAV CHt-2, AAV CHt-3, AAV CHt-6.1, AAV CHt-6.10, AAV CHt-6.5, AAV CHt-6.6, AAV CHt-6.7, AAV CHt-6.8, AAV CHt-P1, AAV CHt-P2, AAV CHt-P5, AAV CHt-P6, AAV CHt-P8, AAV CHt-P9, AAV CKd-1, AAV CKd-10, AAV CKd-2, AAV CKd-3, AAV CKd-4, AAV CKd-6, AAV CKd-7, AAV CKd-8, AAV CKd-B1, AAV CKd-B2, AAV CKd-B3, AAV CKd-B4, AAV CKd-B5, AAV CKd-B6, AAV CKd-B7, AAV CKd-B8, AAV CKd-H1, AAV CKd-H2, AAV CKd-H3, AAV CKd-H4, AAV CKd-H5. AAV CKd-H6, AAV CKd-N3, AAV CKd-N4, AAV CKd-N9, AAV CLg-F1, AAV CLg-F2, AAV CLg-F3, AAV CLg-F4, AAV CLg-F5, AAV CLg-F6, AAV CLg-F7, AAV CLg-F8, AAV CLv-1, AAV CLv1-1, AAV Clv1-10, AAV CLv-2, AAV CLv-12, AAV CLv1-3, AAV CLv-13, AAV CLv1-4, AAV Clv1-7, AAV Clv1-8, AAV Clv1-9, AAV CLv-2, AAV CLv-3. AAV CLv-4, AAV CLv-6. AAV CLv-8, AAV CLv-D1 AAV CLv-D2, AAV CLv-D3, AAV CLv-D4, AAV CLv-D5, AAV CLv-D6, AAV CLv-D7, AAV CLv-D8, AAV CLv-E1, AAV CLv-K1, AAV CLv-K3, AAV CLv-K6. AAV CLv-L4. AAV CLv-L5, AAV CLv-L6, AAV CLv-M1, AAV CLv-M11, AAV CLv-M2, AAV CLv-M5, AAV CLv-M6, AAV CLv-M7, AAV CLv-M8, AAV CLv-M9, AAV CLv-R1, AAV CLv-R2, AAV CLv-R3, AAV CLv-R4, AAV CLv-R5, AAV CLv-R6, AAV CLv-R7, AAV CLv-R8, AAV CLv-R9, AAV CSp-1, AAV CSp-10, AAV CSp-11, AAV CSp-2, AAV CSp-3, AAV CSp-4, AAV CSp-6, AAV CSp-7, AAV CSp-8, AAV CSp-8.10, AAV CSp-8.2, AAV CSp-8.4, AAV CSp-8.5, AAV CSp-8.6, AAV CSp-8.7, AAV CSp-8.8, AAV CSp-8.9, AAV CSp-9, AAV.hu.48R3, AAV.VR-355, AAV3B, AAV4, AAV5, AAVF1/HSC1, AAVF11/HSC11, AAVF12/HSC12, AAVF13/HSC13, AAVF14/HSC14, AAVF15/HSC15, AAVF16/HSC16, AAVF17/HSC17, AAVF2/HSC2, AAVF3/HSC3, AAVF4/HSC4, AAVF5/HSC5, AAVF6/HSC6, AAVF7/HSC7, AAVF8/HSC8, and/or AAVF9/HSC9 and variants thereof. In one embodiment, the AAV capsid is VOY101, or variant thereof. In one embodiment, the AAV capsid is VOY201, or variant thereof. In one embodiment, the AAV capsid is VOY801, or variant thereof. In one embodiment, the AAV capsid is VOY1101, or variant thereof.

[0539] In accordance with the present disclosure, methods for increasing expression of a target protein in a cell, tissue, organ or subject are provided; the method comprising administering the cell, tissue, organ or subject an effective amount of the AAV particles comprising a functional payload that comprises a nucleic acid sequence encoding the target protein.

[0540] Accordingly, the target protein may be increased by at least about 10%, preferably by at least about 10%, 30%, 40%, 50%, 60%, 70%, 80%, 85%, 90%, 95% and 100%, or at least 20-30%, 20-40%, 20-50%, 20-60%, 20-70%, 20-80%, 20-90%, 20-95%, 20-100%, 30-40%, 30-50%, 30-60%, 30-70%, 30-80%, 30-90%, 30-95%, 30-100%, 40-50%, 40-60%, 40-70%, 40-80%, 40-90%, 40-95%, 40-100%, 50-60%, 50-70%, 50-80%, 50-90%, 50-95%, 50-100%, 60-70%, 60-80%, 60-90%, 60-95%, 60-100%, 70-80%, 70-90%, 70-95%, 70-100%, 80-90%, 80-95%, 80-100%, 90-95%, 90-100% or 95-100%.

[0541] In one embodiment, the AAV particles, compositions and formulations of the present disclosure may be used to increase the expression of a target protein in a cell of the CNS, such as a neuron, astrocyte and/or oligodendrocyte. In some embodiments, the gene may encode a protein including but not limited to an antibody, Aromatic L-Amino Acid Decarboxylase (AADC). ApoE2, Frataxin, survival motor neuron (SMN) protein, glucocerebrosidase, N-sulfoglucosamine sulfohydrolase, N-acetyl-alpha-glucosaminidase, iduronate 2-sulfatase, alpha-L-iduronidase, palmitoyl-protein thioesterase 1, tripeptidyl peptidase 1, battenin, CLN5, CLN6 (linclin), MFSD8, CLN8, aspartoacylase (ASPA), progranulin (GRN). MeCP2, beta-galactosidase (GLB1) and/or gigaxonin (GAN).

[0542] In some embodiments, AAV particles, compositions and formulations of the present disclosure may be used to decrease, inhibit and suppress the expression of a gene of interest in a cell, tissue, organ or subject. Accordingly, the AAV particles comprise at least one functional payload that encodes siRNA duplexes or dsRNA specific to the target gene of interest.

[0543] In some embodiments, the present disclosure provides methods for inhibiting/silencing target gene expression in a cell. Accordingly, the siRNA duplexes or encoded dsRNA can be used to substantially inhibit target gene expression in a cell, such as but not limited to, astrocytes or microglia, cortical, hippocampal, entorhinal, thalamic, motor or primary sensory neurons. In some aspects, the inhibition of target gene expression refers to an inhibition by at least about 20%, such as by at least about 30%, 40%, 50%, 60%, 700, 80%, 85%, 90%, 95% and 100%, or at least 20-30%, 20-40%, 20-50%, 20-60%, 20-70%, 20-80%, 20-90%, 20-95%, 20-100%, 3040%, 30-50%, 30-60%, 30-70%, 30-80%, 30-90%, 30-95%, 30-100%, 40-50%, 40-60%, 40-70%, 40-80%, 40-90%, 40-95%, 40-100%, 50-60%, 50-70%, 50-80%, 50-90%, 50-95%, 50-100%, 60-70%, 60-80%, 60-90%, 60-95%, 60-100%, 70-80%, 70-90%, 70-95%, 70-100%, 80-90%, 80-95%, 80-100%, 90-95%, 90-100% or 95-100%. Accordingly, the protein product of the targeted gene may be inhibited by at least about 20%, preferably by at least about 30%, 40%, 50%, 60%, 70%, 80%, 85%, 90%, 95% and 100%, or at least 20-30%, 20-40%, 20-50%, 20-60%, 20-70%, 20-80%, 20-90%, 20-95%, 20-100%, 30-40%, 30-50%, 30-60%, 30-70%, 30-80%, 30-90%, 30-95%, 30-100%, 40-50%, 40-60%, 40-70%, 40-80%, 40-90%, 40-95%, 40-100%, 50-60%, 50-70%, 50-80%, 50-90%, 50-95%, 50-100%, 60-70%, 60-80%, 60-90%, 60-95%, 60-100%, 70-80%, 70-90%, 70-95%, 70-100%, 80-90%, 80-95%, 80-100%, 90-95%, 90-100% or 95-100%.

[0544] In some embodiments, the genes to be inhibited may include but are not limited to superoxide dismutase 1 (SOD1), chromosome 9 open reading frame 72 (C90RF72), TAR DNA binding protein (TARDBP), ataxin-3 (ATXN3), huntingtin (HT), amyloid precursor protein (APP), apolipoprotein E (ApoE), microtubule-associated protein tau (MAPT), alpha-synuclein (SNCA), voltage-gated sodium channel alpha subunit 9 (SCN9A), and/or voltage-gated sodium channel alpha subunit 10 (SCN10A).

### Neurological Disease

[0545] Various neurological diseases may be treated with pharmaceutical compositions, AAV particles, especially blood brain barrier crossing AAV particles of the present disclosure. As a non-limiting example, the neurological disease may be Absence of the Septum Pellucidum. Acid Lipase Disease, Acid Maltase Deficiency. Acquired Epileptiform Aphasia, Acute Disseminated Encephalomyelitis, Attention Deficit-Hyperactivity Disorder (ADHD), Adie's Pupil, Adie's Syndrome, Adrenoleukodystrophy, Agenesis of the Corpus Callosum, Agnosia, Aicardi Syndrome, Aicardi-Goutieres Syndrome Disorder, AIDS—Neurological Complications, Alexander Disease, Alpers' Disease, Alternating Hemiplegia, Alzheimer's Disease, Amyotrophic Lateral Sclerosis (ALS), Anencephaly, Aneurysm, Angelman Syndrome, Angiomatosis, Anoxia, Antiphospholipid Syndrome, Aphasia, Apraxia, Arachnoid Cysts, Arachnoiditis, Amold-Chiari Malformation, Arteriovenous Malformation, Asperger Syndrome, Ataxia, Ataxia Telangiectasia, Ataxias and Cerebellar or Spinocerebellar Degeneration, Atrial Fibrillation and Stroke, Attention Deficit-Hyperactivity Disorder, Autism Spectrum Disorder, Autonomic Dysfunction, Back Pain, Barth Syndrome, Batten Disease, Becker's Myotonia, Bechet's Disease, Bell's Palsy, Benign Essential Blepharospasm, Benign Focal Amyotrophy, Benign Intracranial Hypertension, Bernhardt-Roth Syndrome, Binswanger's Disease, Blepharospasm, Bloch-Sulzberger Syndrome, Brachial Plexus Birth Injuries, Brachial Plexus Injuries, Bradbury-Eggleston Syndrome, Brain and Spinal Tumors, Brain Aneurysm, Brain Injury, Brown-Sequard Syndrome, Bulbospinal Muscular Atrophy, Cerebral Autosomal Dominant Arteriopathy with Subcortical Infarcts and Leukoencephalopathy (CADASIL), Canavan Disease, Carpal Tunnel Syndrome, Causalgia, Cavemomas, Cavernous Angioma, Cavernous Malformation, Central Cervical Cord Syndrome, Central Cord Syndrome, Central Pain Syndrome, Central Pontine Myelinolysis, Cephalic Disorders, Ceramidase Deficiency, Cerebellar Degeneration, Cerebellar Hypoplasia, Cerebral Aneurysms, Cerebral Arteriosclerosis, Cerebral Atrophy, Cerebral Beriberi, Cerebral Cavernous Malformation, Cerebral Gigantism, Cerebral Hypoxia, Cerebral Palsy, Cerebro-Oculo-Facio-Skeletal Syndrome (COFS), Charcot-Marie-Tooth Disease, Chiari Malformation, Cholesterol Ester Storage Disease, Chorea, Choreoacanthocytosis, Chronic Inflammatory Demyelinating Polyneuropathy (CIDP), Chronic Orthostatic Intolerance, Chronic Pain, Cockayne Syndrome Type II, Coffin Lowry Syndrome, Colpocephaly, Coma, Complex Regional Pain Syndrome, Congenital Facial Diplegia, Congenital Myasthenia, Congenital Myopathy, Congenital Vascular Cavemous Malformations, Corticobasal Degeneration, Cranial Arteritis, Craniosynostosis, Cree encephalitis, Creutzfeldt-Jakob Disease, Cumulative Trauma Disorders, Cushing's Syndrome, Cytomegalic Inclusion Body Disease, Cytomegalovirus Infection, Dancing Eyes-Dancing Feet Syndrome, Dandy-Walker Syndrome, Dawson Disease, De Morsier's Syndrome, Dejerine-Klumpke Palsy, Dementia, Dementia—Multi-Infarct, Dementia—Semantic, Dementia—Subcortical, Dementia With Lewy Bodies, Dentate Cerebellar Ataxia, Dentatorubral Atrophy, Dermatomyositis, Developmental Dyspraxia, Devic's Syndrome, Diabetic Neuropathy, Diffuse Sclerosis, Dravet Syndrome, Dysautonomia, Dysgraphia, Dyslexia, Dysphagia, Dyspraxia, Dyssynergia Cerebellaris Myoclonica, Dyssynergia Cerebellaris Progressiva, Dystonias, Early Infantile Epileptic Encephalopathy, Empty Sella Syndrome, Encephalitis, Encephalitis Lethargica, Encephaloceles, Encephalopathy, Encephalopathy (familial infantile), Encephalotrigeminal Angiomatosis, Epilepsy, Epileptic Hemiplegia, Erb's Palsy, Erb-Duchenne and Dejerine-Klumpke Palsies, Essential Tremor, Extrapontine Myelinolysis, Fabry Disease, Fahr's Syndrome, Fainting, Familial Dysautonomia, Familial Hemangioma, Familial Idiopathic Basal Ganglia Calcification, Familial Periodic Paralyses, Familial Spastic Paralysis, Farber's Disease, Febrile Seizures, Fibromuscular Dysplasia, Fisher Syndrome, Floppy Infant Syndrome, Foot Drop, Friedreich's Ataxia, Frontotemporal Dementia, Gaucher Disease, Generalized Gangliosidoses, Gerstmann's Syndrome, Gerstmann-Straussler-Scheinker Disease, Giant Axonal Neuropathy, Giant Cell Arteritis, Giant Cell Inclusion Disease, Globoid Cell Leukodystrophy, Glossopharyngeal Neuralgia, Glycogen Storage Disease, Guillain-Barre Syndrome, Hallervorden-Spatz Disease, Head Injury, Headache, Hemicrania Continua, Hemifacial Spasm, Hemiplegia Alterans, Hereditary Neuropathies, Hereditary Spastic Paraplegia, Heredopathia Atactica Polyneuritiformis, Herpes Zoster, Herpes Zoster Oticus, Hirayama Syndrome, Holmes-Adie syndrome, Holoprosencephaly, HTLV-1 Associated Myelopathy, Hughes Syndrome, Huntington's Disease, Hydranencephaly, Hydrocephalus, Hydrocephalus—Normal Pressure, Hydromyelia, Hypercortisolism, Hypersomnia, Hypertonia, Hypotonia, Hypoxia, Immunc-Mediated Encephalomyclitis, Inclusion Body Myositis, Incontinentia Pigmenti, Infantile Hypotonia, Infantile Neuroaxonal Dystrophy, Infantile Phytanic Acid Storage Disease, Infantile Refsum Disease, Infantile Spasms, Inflammatory Mopathies, Iniencephaly, Intestinal Lipodystrophy, Intracranial Cysts, Intracranial Hypertension, Isaacs' Syndrome, Joubert Syndrome, Kearns-Sayre Syndrome, Kennedy's Disease, Kinsboume syndrome, Kleine-Levin Syndrome, Klippel-Feil Syndrome, Klippel-Trenaunay Syndrome (KTS), Kluver-Bucy Syndrome, Korsakoffs Amnesic Syndrome, Krabbe Disease, Kugelberg-Welander Disease, Kuru, Lambert-Eaton Myasthenic Syndrome, Landau-Kleffner Syndrome, Lateral Femoral Cutaneous Nerve Entrapment, Lateral Medullary Syndrome, Learning Disabilities, Leigh's Disease, Lennox-Gastaut Syndrome, Lesch-Nyhan Syndrome, Leukodystrophy, Levine-Critchley Syndrome, Lewy Body Dementia, Lipid Storage Diseases, Lipoid Proteinosis, Lissencephaly, Locked-In Syndrome, Lou Gehrig's Disease, Lupus—Neurological Sequelae, Lyme Disease—Neurological Complications, Machado-Joseph Disease, Macrencephaly, Megalencephaly, Melkersson-Rosenthal Syndrome, Meningitis, Meningitis and Encephalitis, Menkes Disease, Meralgia Paresthetica, Metachromatic Leukodystrophy, Microcephaly, Migraine, Miller Fisher Syndrome, Mini Stroke, Mitochondrial Myopathy, Moebius Syndrome, Monomelic Amyotrophy, Motor Neuron Diseases, Moyamova Disease, Mucolipidoses, Mucopolysaccharidoses, Multi-Infarct Dementia, Multifocal Motor Neuropathy, Multiple Sclerosis, Multiple System Atrophy, Multiple System Atrophy with Orthostatic Hypotension, Muscular Dystrophy, Myasthenia—Congenital, Myasthenia Gravis, Myelinoclastic Diffuse Sclerosis, Myoclonic Encephalopathy of Infants, Myoclonus, Myopathy, Myopathy—Congenital, Myopathy—Thyrotoxic, Myotonia, Myotonia Congenita, Narcolepsy, Neuroacanthocytosis, Neurodegeneration with Brain Iron Accumulation, Neurofibromatosis, Neuroleptic Malignant Syndrome, Neurological Complications of AIDS, Neurological Complications of Lyme Disease, Neurological Consequences of Cytomegalovirus Infection, Neurological Manifestations of Pompe Disease, Neurological Sequelae Of Lupus, Neuromyelitis Optica, Neuromyotonia, Neuronal Ceroid Lipofuscinosis, Neuronal Migration Disorders, Neuropathv—Hereditary, Neurosarcoidosis, Neurosyphilis, Neurotoxicity, Nevus Cavernosus, Niemann-Pick Disease, O'Sullivan-McLeod Syndrome, Occipital Neuralgia, Ohtahara Syndrome, Olivopontocerebellar Atrophy, Opsoclonus Myoclonus, Orthostatic Hypotension, Overuse Syndrome, Pain—Chronic, Pantothenate Kinase-Associated Neurodegeneration, Paraneoplastic Syndromes, Paresthesia, Parkinson's Disease, Paroxysmal Choreoathetosis, Paroxysmal Hemicrania, Parry-Romberg, Pelizaeus-Merzbacher Disease, Pena Shokeir II Syndrome, Perineural Cysts, Periodic Paralyses, Peripheral Neuropathy, Periventricular Leukomalacia, Persistent Vegetative State, Pervasive Developmental Disorders, Phytanic Acid Storage Disease, Pick's Disease, Pinched Nerve, Piriformis Syndrome, Pituitary Tumors, Polymyositis, Pompe Disease, Porencephaly, Post-Polio Syndrome, Postherpetic Neuralgia, Postinfectious Encephalomvelitis, Postural Hypotension, Postural Orthostatic Tachycardia Syndrome, Postural Tachycardia Syndrome, Primary Dentatum Atrophy, Primary Lateral Sclerosis, Primary Progressive Aphasia, Prion Diseases, Progressive Hemifacial Atrophy, Progressive Locomotor Ataxia, Progressive Multifocal Leukoencephalopathy, Progressive Sclerosing Poliodystrophy, Progressive Supranuclear Palsy, Prosopagnosia, Pseudo-Torch syndrome, Pseudotoxoplasmosis syndrome, Pseudotumor Cerebri, Psychogenic Movement, Ramsay Hunt Syndrome 1, Ramsay Hunt Syndrome II, Rasmussen's Encephalitis, Reflex Sympathetic Dystrophy Syndrome, Refsum Disease, Refsum Disease—Infantile, Repetitive Motion Disorders, Repetitive Stress Injuries, Restless Legs Syndrome, Retrovirus-Associated Myelopathy, Rett Syndrome, Reye's Syndrome, Rheumatic Encephalitis, Riley-Day Syndrome, Sacral Nerve Root Cysts, Saint Vitus Dance, Salivary Gland Disease, Sandhoff Disease, Schilder's Disease, Schizencephaly, Seitelberger Disease, Seizure Disorder, Semantic Dementia, Septo-Optic Dysplasia, Severe Myoclonic Epilepsy of Infancy (SMEI), Shaken Baby Syndrome, Shingles, Shy-Drager Syndrome, Sjögren's Syndrome, Sleep Apnea, Sleeping Sickness, Sotos Syndrome, Spasticity, Spina Bifida, Spinal Cord Infarction, Spinal Cord Injury, Spinal Cord Tumors, Spinal Muscular Atrophy, Spinocerebellar Atrophy, Spinocerebellar Degeneration, Steele-Richardson-Olszewski Syndrome, Stiff-Person Syndrome, Striatonigral Degeneration, Stroke, Sturge-Weber Syndrome, Subacute Sclerosing Panencephalitis, Subcortical Arteriosclerotic Encephalopathy, Short-lasting, Unilateral, Neuralgiform (SUNCT) Headache, Swallowing Disorders, Sydenham Chorea, Syncope, Syphilitic Spinal Sclerosis, Syringohydromyelia, Syringomyelia, Systemic Lupus Erythematosus, Tabes Dorsalis, Tardive Dyskinesia, Tarlov Cysts, Tay-Sachs Disease, Temporal Arteritis, Tethered Spinal Cord Syndrome, Thomsen's Myotonia, Thoracic Outlet Syndrome, Thyrotoxic Myopathy, Tic Douloureux, Todd's Paralysis, Tourette Syndrome, Transient Ischemic Attack, Transmissible Spongiform Encephalopathies, Transverse Myelitis, Traumatic Brain Injury, Tremor, Trigeminal Neuralgia, Tropical Spastic Paraparesis, Troyer Syndrome, Tuberous Sclerosis, Vascular Erectile Tumor, Vasculitis Syndromes of the Central and Peripheral Nervous Systems, Von Economo's Disease, Von Hippel-Lindau Disease (VHL), Von Recklinghausen's Disease, Wallenberg's Syndrome, Werdnig-Hoffman Disease, Wernicke-Korsakoff Syndrome, West Syndrome, Whiplash, Whipple's Disease, Williams Syndrome, Wilson Disease, Wolman's Disease, X-Linked Spinal and Bulbar Muscular Atrophy.

[0546] The present disclosure additionally provides a method for treating neurological disorders in a mammalian subject, including a human subject, comprising administering to the subject a pharmaceutically effective amount of any of the AAV particles or pharmaceutical compositions described herein. In one embodiment, the AAV particle is a blood brain barrier crossing particle. In some embodiments, neurological disorders treated according to the methods described herein include, but are not limited to, tauopathies, Alzheimer's disease (AD), Amyotrophic lateral sclerosis (ALS), Huntington's Disease (HD), Parkinson's Disease (PD), and/or Friedreich's Ataxia (FA). In some embodiments, at least one symptom of neurological disorders in the subject is ameliorated and/or treated.

[0547] The present disclosure provides a method for administering to a subject in need thereof, including a human subject, a therapeutically effective amount of the AAV particles of the disclosure to slow, stop or reverse disease progression. As a non-limiting example, disease progression may be measured by tests or diagnostic tool(s) known to those skilled in the art. As another non-limiting example, disease progression may be measured by change in the pathological features of the brain, CSF or other tissues of the subject.

[0548] In some embodiments, the AAV particle comprising a payload region having a nucleic acid sequence encoding a target protein may be administered to the subject in need for treating and/or ameliorating a neurological disorder.

[0549] In some embodiments, the AAV particle comprising a payload region having the nucleic acid sequence encoding at least one siRNA duplex or dsRNA targeting a gene of interest may be administered to the subject in need for treating and/or ameliorating a neurological disorder.

[0550] In one embodiment, the AAV particle used for treating neurological disorders may have a serotype including a capsid and/or a peptide insert such as but not limited to VOY101, VOY201, VOY801, VOY1101, AAVPHP.B (PHP.B), AAVPHP.A (PHP.A), AAVG2B-26, AAVG2B-13, AAVTH1.1-32, AAVTH1.1-35, AAVPHP.B2 (PHP.B2), AAVPHP.B3 (PHP.B3), AAVPHP.N/PHP.B-DGT, AAVPHP.B-EST, AAVPHP.B-GGT, AAVPHP.B-ATP, AAVPHP.B-ATT-T, AAVPHP.B-DGT-T, AAVPHP.B-GGT-T, AAVPHP.B-SGS, AAVPHP.B-AQP, AAVPHP.B-QQP, AAVPHP.B-SNP(3), AAVPHP.B-SNP, AAVPHP.B-QGT, AAVPHP.B-NQT, AAVPHP.B-EGS, AAVPHP.B-SGN, AAVPHP.B-EGT, AAVPHP.B-DST, AAVPHP.B-DST, AAVPHP.B-STP, AAVPHP.B-PQP, AAVPHP.B-SQP, AAVPHP.B-QLP, AAVPHP.B-TMP, AAVPHP.B-TTP, AAVPHP.S/G2A12, AAVG2A15/G2A3 (G2A3), AAVG2B4 (G2B4), AAVG2B5, PHP.S, AAV1, AAV2, AAV2G9, AAV3, AAV3a, AAV3b, AAV3-3, AAV4, AAV4-4, AAV5, AAV6, AAV6.1, AAV6.2, AAV6.1.2, AAV7, AAV7.2, AAV8, AAV9, AAV9.11, AAV9.13, AAV9.16, AAV9.24, AAV9.45, AAV9.47, AAV9.61, AAV9.68, AAV9.84, AAV9.9, AAV10, AAV11, AAV12, AAV16.3, AAV24.1, AAV27.3, AAV42.12, AAV42-1b, AAV42-2, AAV42-3a. AAV42-3b, AAV42-4, AAV42-5a, AAV42-5b. AAV42-6b, AAV42-8, AAV42-10, AAV42-11, AAV42-12, AAV42-13, AAV42-15, AAV42-aa, AAV43-1, AAV43-12, AAV43-20, AAV43-21, AAV43-23, AAV43-25, AAV43-5, AAV44.1, AAV44.2, AAV44.5, AAV223.1, AAV223.2, AAV223.4, AAV223.5, AAV223.6, AAV223.7, AAV1-7/rh.48, AAV-8/rh.49, AAV2-15/rh.62, AAV2-3/rh.61, AAV2-4/rh.50, AAV2-5/rh.51, AAV3.1/hu.6, AAV3.1/hu.9, AAV3-9/rh.52, AAV3-11/rh.53, AAV4-8/r11.64, AAV4-9/rh.54, AAV4-19/rh.55, AAV5-3/rh.57, AAV5-22/rh.58, AAV7.3/hu.7, AAV16.8/hu.10, AAV16.12/hu.11, AAV29.3/bb.1, AAV29.5/bb.2, AAV106.1/hu.37, AAV114.3/hu.40, AAV127.2/hu.41, AAV127.5/hu.42, AAV128.3/hu.44, AAV130.4/hu.48, AAV145.1/hu.53, AAV145.5/hu.54, AAV145.6/hu.55, AAV161.10/hu.60, AAV161.6/hu.61, AAV33.12/hu.17, AAV33.4/hu.15, AAV33.8/hu.16, AAV52/hu.19, AAV52.1/hu.20, AAV58.2/hu.25, AAVA3.3, AAVA3.4, AAVA3.5, AAVA3.7, AAVC1, AAVC2, AAVC5, AAV-DJ. AAV-DJ8, AAVF3, AAVF5. AAVH2, AAVrh.72, AAVhu.8, AAVrh.68, AAVrh.70, AAVpi.1, AAVpi.3, AAVpi.2, AAVrh.60, AAVrh.44, AAVrh.65, AAVrh.55, AAVrh.47, AAVrh.69, AAVrh.45, AAVrh.59, AAVhu.12, AAVH6, AAVLK03, AAVH-1/hu.1, AAVH-5/hu.3, AAVLG-10/rh.40, AAVLG-4/rh.38, AAVLG-9/hu.39, AAVN721-8/rh.43, AAVCh.5, AAVCh.5R1, AAVcy.2, AAVcy.3, AAVcy.4, AAVcy.5, AAVCy.5R1, AAVCy.5R2, AAVCy.5R3, AAVCy.5R4, AAVcy.6, AAVhu.1, AAVhu.2, AAVhu.3, AAVhu.4, AAVhu.5, AAVhu.6, AAVhu.7, AAVhu.9, AAVhu.10. AAVhu.11, AAVhu.13, AAVhu.15, AAVhu.16. AAVhu.17. AAVhu.18. AAVhu.20, AAVhu.21, AAVhu.22, AAVhu.23.2, AAVhu.24, AAVhu.25, AAVhu.27, AAVhu.28, AAVhu.29, AAVhu.29R, AAVhu.31, AAVhu.32, AAVhu.34, AAVhu.35, AAVhu.37, AAVhu.39, AAVhu.40, AAVhu.41, AAVhu.42, AAVhu.43, AAVhu.44, AAVhu.44R1, AAVhu.44R2, AAVhu.44R3, AAVhu.45. AAVhu.46, AAVhu.47, AAVhu.48, AAVhu.48R1. AAVhu.48R2, AAVhu.48R3, AAVhu.49, AAVhu.51, AAVhu.52, AAVhu.54, AAVhu.55, AAVhu.56, AAVhu.57, AAVhu.58, AAVhu.60. AAVhu.61, AAVhu.63, AAVhu.64, AAVhu.66, AAVhu.67, AAVhu.14/9, AAVhu.t 19, AAVrh.2, AAVrh.2R, AAVrh.8, AAVrh.8R, AAVrh.10, AAVrh.12, AAVrh.13, AAVrh.13R, AAVrh.14, AAVrh.17. AAVrh.18, AAVrh.19, AAVrh.20, AAVrh.21, AAVrh.22, AAVrh.23. AAVrh.24, AAVrh.25, AAVrh.31, AAVrh.32, AAVrh.33, AAVrh.34, AAVrh.35, AAVrh.36, AAVrh.37, AAVrh.37R2, AAVrh.38, AAVrh.39, AAVrh.40, AAVrh.46, AAVrh.48, AAVrh.48.1. AAVrh.48.1.2, AAVrh.48.2, AAVrh.49, AAVrh.51, AAVrh.52, AAVrh.53. AAVrh.54, AAVrh.56, AAVrh.57, AAVrh.58, AAVrh.61, AAVrh.64, AAVrh.64R1, AAVrh.64R2, AAVrh.67, AAVrh.73, AAVrh.74, AAVrh8R. AAVrh8R A586R mutant, AAVrh8R R533A mutant. AAAV, BAAV, caprine AAV, bovine AAV, AAVhE1.1. AAVhEr1.5, AAVhER1.14, AAVhEr1.8, AAVhEr1.16, AAVhEr1.18, AAVhEr1.35, AAVhEr1.7, AAVhEr1.36, AAVhEr2.29, AAVhEr2.4, AAVhEr2.16, AAVhEr2.30, AAVhEr2.31, AAVhEr2.36, AAVhER1.23, AAVhEr3.1, AAV2.5T, AAV-PAEC, AAV-LK01, AAV-LK02, AAV-LK03, AAV-LK04, AAV-LK05, AAV-LK06, AAV-LK07, AAV-LK08, AAV-LK09, AAV-LK10, AAV-LK11, AAV-LK12, AAV-LK13, AAV-LK14, AAV-LK15, AAV-LK16, AAV-LK17, AAV-LK18, AAV-LK19, AAV-PAEC2, AAV-PAEC4, AAV-PAEC6, AAV-PAEC7, AAV-PAEC8, AAV-PAEC11, AAV-PAEC12, AAV-2-pre-miRNA-101. AAV-8h, AAV-8b, AAV-h, AAV-b, AAV SM 10-2. AAV Shuffle 100-1, AAV Shuffle 100-3, AAV Shuffle 100-7, AAV Shuffle 10-2, AAV Shuffle 10-6, AAV Shuffle 10-8, AAV Shuffle 100-2, AAV SM 10-1, AAV SM 10-8, AAV SM 100-3, AAV SM 100-10, BNP61 AAV. BNP62 AAV, BNP63 AAV. AAVrh.50, AAVrh.43, AAVrh.62, AAVrh.48, AAVhu.19. AAVhu.11. AAVhu.53, AAV4-8/rh.64, AAVLG-9/hu.39, AAV54.5/hu.23, AAV54.2/hu.22, AAV54.7/hu.24, AAV54.1/hu.21, AAV54.4R/hu.27, AAV46.2/hu.28, AAV46.6/hu.29, AAV128.1/hu.43, true type AAV (ttAAV), UPENN AAV 10, Japanese AAV10 serotypes, AAV CBr-7.1, AAV CBr-7.10, AAV CBr-7.2, AAV CBr-7.3, AAV CBr-7.4, AAV CBr-7.5, AAV CBr-7.7, AAV CBr-7.8, AAV CBr-B7.3, AAV CBr-B7.4, AAV CBr-E1, AAV CBr-E2, AAV CBr-E3, AAV CBr-E4, AAV CBr-E5, AAV CBr-e5, AAV CBr-E6, AAV CBr-E7, AAV CBr-E8, AAV CHt-1, AAV CHt-2, AAV CHt-3, AAV CHt-6.1, AAV CHt-6.10. AAV CHt-6.5, AAV CHt-6.6, AAV CHt-6.7, AAV CHt-6.8. AAV CHt-P1, AAV CHt-P2, AAV CHt-P5, AAV CHt-P6, AAV CHt-P8, AAV CHt-P9, AAV CKd-1, AAV CKd-10, AAV CKd-2, AAV CKd-3. AAV CKd-4, AAV CKd-6, AAV CKd-7, AAV CKd-8, AAV CKd-B1, AAV CKd-B2, AAV CKd-B3, AAV CKd-B4, AAV CKd-B5, AAV CKd-B6, AAV CKd-B7, AAV CKd-B8, AAV CKd-H1, AAV CKd-H2, AAV CKd-H3, AAV CKd-H4, AAV CKd-H5, AAV CKd-H6, AAV CKd-N3, AAV CKd-N4, AAV CKd-N9, AAV CLg-F1, AAV CLg-F2, AAV CLg-F3, AAV CLg-F4, AAV CLg-F5, AAV CLg-F6, AAV CLg-F7, AAV CLg-F8, AAV CLv-1, AAV CLv1-1, AAV Clv1-10, AAV CLv1-2, AAV CLv-12, AAV CLv1-3, AAV CLv-13, AAV CLv1-4, AAV Clv1-7, AAV Clv1-8, AAV Clv1-9, AAV CLv-2, AAV CLv-3, AAV CLv-4, AAV CLv-6, AAV CLv-8, AAV CLv-D1, AAV CLv-D2, AAV CLv-D3, AAV CLv-D4, AAV CLv-D5, AAV CLv-D6, AAV CLv-D7, AAV CLv-D8, AAV CLv-E1, AAV CLv-K1, AAV CLv-K3, AAV CLv-K6, AAV CLv-L4, AAV CLv-L5, AAV CLv-L6, AAV CLv-M1, AAV CLv-M11, AAV CLv-M2, AAV CLv-M5, AAV CLv-M6, AAV CLv-M7, AAV CLv-M8, AAV CLv-M9, AAV CLv-R1, AAV CLv-R2, AAV CLv-R3, AAV CLv-R4, AAV CLv-R5, AAV CLv-R6, AAV CLv-R7, AAV CLv-R8, AAV CLv-R9, AAV CSp-1, AAV CSp-10, AAV CSp-11, AAV CSp-2, AAV CSp-3, AAV CSp-4, AAV CSp-6, AAV CSp-7, AAV CSp-8, AAV CSp-8.10, AAV CSp-8.2, AAV CSp-8.4, AAV CSp-8.5, AAV CSp-8.6, AAV CSp-8.7, AAV CSp-8.8, AAV CSp-8.9, AAV CSp-9, AAV.hu.48R3, AAV.VR-355, AAV3B, AAV4, AAV5, AAVF1/HSC1, AAVF11/HSC11, AAVF12/HSC12, AAVF13/HSC13, AAVF14/HSC14, AAVF15/HSC15, AAVF16/HSC16, AAVF17/HSC17, AAVF2/HSC2, AAVF3/HSC3, AAVF4/HSC4, AAVF5/HSC5, AAVF6/HSC6, AAVF7/HSC7, AAVF8/HSC8, and/or AAVF9/HSC9 and variants thereof.

[0551] In some embodiments, the AAV particles for treating neurological disorders in the subject comprise the VOY101 capsid. In one embodiment, the VOY101 capsid comprises the amino acid sequence of SEQ ID NO. 1. In one embodiment, the VOY101 capsid comprises the nucleic acid sequence of SEQ ID NO. 1809.

[0552] In some embodiments, the AAV particles for treating neurological disorders in the subject comprise the VOY201 capsid. In one embodiment, the VOY201 capsid comprises the amino acid sequence of SEQ ID NO. 1823. In one embodiment, the VOY201 capsid comprises the nucleic acid sequence of SEQ ID NO. 1810.

[0553] In some embodiments, the AAV particles for treating neurological disorders in the subject comprise the VOY801 capsid. In one embodiment, the VOY801 capsid comprises the nucleic acid sequence of SEQ ID NO. 1824.

[0554] In some embodiments, the AAV particles for treating neurological disorders in the subject comprise the VOY1101 capsid. In one embodiment, the VOY1101 capsid comprises the nucleic acid sequence of SEQ ID NO. 1825.

[0555] In some embodiments, the AAV particles comprising payloads for treating neurological disorders such as siRNA molecules may be introduced directly into the central nervous system of the subject, for example, by infusion into the putamen.

[0556] In some embodiments, the AAV particles comprising payloads for treating neurological disorders such as siRNA molecules may be introduced directly into the central nervous system of the subject, for example, by infusion to the thalamus of a subject.

[0557] In some embodiments, the AAV particles comprising payloads for treating neurological disorders such as siRNA molecules may be introduced directly into the central nervous system of the subject, for example, by infusion to the white matter of a subject. In some embodiments, the AAV particles comprising payloads for treating neurological disorders such as siRNA molecules may be introduced to the central nervous system of the subject, for example, by intravenous administration to a subject.

[0558] In some embodiments, the pharmaceutical composition comprising the AAV particles described herein is used as a solo therapy. In other embodiments, the pharmaceutical composition comprising the AAV particles described herein is used in combination therapy. As a non-limiting example, the combination therapy may be in combination with one or more neuroprotective agents such as small molecule compounds, growth factors and hormones which have been tested for their neuroprotective effect on motor neuron degeneration.

### Tauopathies

[0559] Tauopathies are a group of neurodegenerative diseases characterized by the dysfunction and/or aggregation of the microtubule associated protein tau. Tau is normally a very soluble protein known to associate with microtubules based on the extent of its phosphorylation. Tau is considered a critical component of intracellular trafficking processes, particularly in neuronal cells, given their unique structure. Hyperphosphorylation of tau depresses its binding to microtubules and microtubule assembly activity. Further, hyperphosphorylation of tau renders it prone to misfolding and aggregation. In tauopathies, the tan becomes hyperphosphorylated, misfolds and aggregates as NFT of paired helical filaments (PHF), twisted ribbons or straight filaments. These NFT are largely considered indicative of impending neuronal cell death and thought to contribute to widespread neuronal cell loss, leading to a variety of behavioral and cognitive deficits.

[0560] The first genetically defined tauopathy was described when mutations in the tau gene were shown to lead to an autosomal dominantly inherited tauopathy known as frontotemporal dementia and parkinsonism linked to chromosome 17 (FTDP-17). This was the first causal evidence that changes in tau could lead to neurodegenerative changes in the brain. These molecules are considered to be more amyloidogenic, meaning they are more likely to become hyperphosphorylated and more likely to aggregate into NFT (Hutton. M. et al., 1998, Nature 393(6686):702-5).

[0561] Other known tauopathies include, but are not limited to, Alzheimer's disease (AD), frontotemporal dementia (FTD), Frontotemporal lobar degeneration (FTLD), chronic traumatic encephalopathy (CTE), Progressive Supranuclear Palsy (PSP), Down's syndrome, Pick's disease, Corticobasal degeneration (CBD), Amyotrophic lateral sclerosis (ALS), Prion diseases, Creutzfeldt-Jakob disease (CJD), Multiple system atrophy, Tangle-only dementia, and Progressive subcortical gliosis.

[0562] Though tauopathies are predominantly associated with tau protein malfunction and aggregation, much like in AD, ApoE is also considered to play a role in the pathogenesis of this group of diseases. ApoE, a cholesterol trafficking molecule, was first suspected to have a role in tauopathy when it was discovered that NFT are also immunoreactive for ApoE. Investigation of the correlations between tau and ApoE in tauopathies have shown contradictory results but suggest a link between ApoE4 and increased NFT load. However, the correlation to cognitive decline has not been shown. Work in this area is still actively being pursued.

[0563] Treatments for tauopathics have yet to be identified, though some symptomatic relief may be provided. Delivery of AAV particles described herein may be used to treat subjects suffering from tauopathy. In some cases, methods of the present disclosure may be used to treat subjects suspected of developing a tauopathy. Delivery of AAV particles may result in decreased accumulation of NFT. Further, these decreases in NFT load may or may not be associated with improvements in cognitive, language or behavioral arenas.

[0564] In one embodiment, delivery of AAV particles of the disclosure, comprising ApoE2, ApoE3 or ApoE4 polynucleotides, may be used to treat subjects suffering from tauopathy.

[0565] In one embodiment, delivery of AAV particles of the disclosure comprising modulatory polynucleotides for the silencing of ApoE2, ApoE3 or ApoE4 gene and/or protein expression may be used to treat subjects suffering from tauopathy.

[0566] In one embodiment, delivery of AAV particles of the disclosure comprising modulatory polynucleotides for the silencing of tau gene and/or protein expression may be used to treat subjects suffering from tauopathy. In one embodiment, the modulatory polynucleotides are siRNA duplexes or nucleic acids encoding siRNA duplexes or encoded dsRNA.

[0567] In one embodiment, delivery of AAV particles of the disclosure comprising a nucleic acid encoding an anti-tau antibody may be used to treat subjects suffering from tauopathy.

[0568] In one embodiment, the compositions described herein are used in combination with one or more known or exploratory treatments for tauopathy. Non-limiting examples of such treatments include inhibitors of tau aggregation, such as Methylene blue, phenothiazines, anthraquinones, n-phenylamines or rhodamines, microtubule stabilizers such as NAP, taxol or paclitaxel, kinase or phosphatase inhibitors such as those targeting GSK3p (lithium) or PP2A, and/or immunization with tau phospho-epitopes or treatment with anti-tau antibodies.

### Alzheimer's Disease

[0569] Alzheimer Disease (AD) is a debilitating neurodegenerative disease and the leading cause of dementia in the elderly today, currently afflicting an estimated 5 million people in the United States and more than 35 million people worldwide. AD is largely a disease of extreme forgetfulness, wherein the ability to lead a normal life is incredibly impaired. Clinical manifestations of the disease include progressive declines in memory, executive function (decision making) and language. Individuals with AD often die from secondary illnesses such as cachexia, pneumonia or sepsis.

[0570] AD is likely the most well-known tauopathy, though it is often characterized as an amyloid based disorder. The AD brain is characterized by the presence of two forms of pathological aggregates, the extracellular plaques composed of β-amyloid (AD) and the intracellular neurofibrillary tangles (NFT) comprised of hyperphosphorylated microtubule associated protein tau. Based on early genetic findings, β-amyloid alterations were thought to initiate disease, with changes in tan considered downstream. For this reason, most clinical trials have been Aβ-centric.

[0571] In addition to the traditional hallmarks of the disease (Aβ and tau), apolipoprotein E has proven to be an important risk factor in the pathogenesis of late onset AD (the form of AD that is not genetically linked to alterations in Aβ processing or production and accounts for 99% of the AD population). ApoE, like other apolipoproteins, contributes to the structure of specific lipoprotein particles and directs lipoprotein trafficking to specific cell surface receptors, and is an important cholesterol transporter. ApoE is expressed in a variety of cell types with highest expression levels evident in the liver and brain. In the brain, ApoE is predominantly expressed in astrocytes and microglia, and is thought to contribute to maintenance of synaptic connections and synaptogenesis. ApoE is thought to contribute to AD pathogenesis through its roles in the blood brain barrier, the innate immune system, synaptic function and accumulation of Aβ.

[0572] The three most common variants of ApoE are ApoE2, ApoE3 and ApoE4, with ApoE2 and ApoE4 carrying differential risks associated with development of AD. ApoE2 is considered to be a protective allele, decreasing risk of AD and delaying the age of onset, whereas ApoE4 has the opposite effect, significantly increasing risk of developing AD and reducing the age of onset of disease. Further, ApoE2 is associated with a decreased burden of accumulated Aβ, whereas ApoE4 is associated with increased AD load.

[0573] Early onset forms of AD (before 65 years, which accounts for <5% of AD cases), may be caused by familial mutations in amyloid beta precursor protein (APP), presenilin 1 (PS1 or PSEN1) or presenilin 2 (PS2 or PSEN2). Common symptoms include progressive decline in memory, executive function, language, and other areas of cognition. These symptoms are often caused by amyloid plaques and/or neurofibrillary tangles in the brain, neuronal loss, synaptic loss, brain atrophy, and/or inflammation.

[0574] Symptomatic treatments for AD have been available for many years, but none are able to alter the course of the disease. Delivery of AAV particles described herein may be used to treat subjects suffering from AD and other tauopathies. In some cases, methods of the present disclosure may be used to treat subjects suspected of developing AD or other tauopathies. Delivery of AAV particles may result in decreased A burden both in the brain and in the cardiovascular system of the subject or in decreased accumulation of NFT. Further, these decreases in Aβ or NFT load, may or may not be associated with improvements in cognitive, language or behavioral arenas.

[0575] In one embodiment, delivery of AAV particles of the disclosure, comprising ApoE2, ApoE3 or ApoE4 polynucleotides, may be used to treat subjects suffering from AD and other tauopathies.

[0576] In one embodiment, delivery of AAV particles of the disclosure comprising modulatory polynucleotides for the silencing of the ApoE2, ApoE3 or ApoE4 gene and/or protein may be used to treat subjects suffering from AD and other tauopathies.

[0577] In one embodiment, delivery of AAV particles of the disclosure comprising modulatory polynucleotides for the silencing of the tau gene and/or protein may be used to treat subjects suffering from AD and other tauopathies. In one embodiment, the modulatory polynucleotides are siRNA duplexes or nucleic acids encoding siRNA duplexes or encoded dsRNA.

[0578] In one embodiment, delivery of AAV particles of the disclosure comprising a nucleic acid encoding an anti-tau antibody may be used to treat subjects suffering from AD and other tauopathies.

[0579] In one embodiment, the compositions described herein are used in combination with one or more known or exploratory treatments for AD or tauopathy. Non-limiting examples of such treatments include cholinesterase inhibitors (donepezil, rivastigmine, galantamine), NMDA receptor antagonists such as memantine, anti-psychotics, anti-depressants, anti-convulsants, secretase inhibitors, amyloid aggregation inhibitors, copper or zinc modulators, BACE inhibitors, inhibitors of tau aggregation, such as Methylene blue, phenothiazines, anthraquinones, n-phenylamines or rhodamines, microtubule stabilizers such as NAP, taxol or paclitaxel, kinase or phosphatase inhibitors such as those targeting GSK3β (lithium) or PP2A, and/or immunization with Aβ peptides or tau phospho-epitopes or treatment with anti-tau or anti-amyloid antibodies.

[0580] In one embodiment, the compositions described herein are evaluated using mammalian models, such as, but not limited to, mouse models of tauopathy and/or Alzheimer's Disease. A great number of mouse models are available that mimic the phenotypes of tauopathies and/or Alzheimer's Disease. However, no existing mouse model exhibits all features of human tauopathies and/or Alzheimer's Disease. Therefore, in some cases, more than one mouse model, or a mouse model cross of one or more of these models, may be used to evaluate the activities of the compositions of the present disclosure. Exemplary mouse models of tauopathies and/or Alzheimer's Disease include, but are not limited to, 3XTg-AD, 5XFAD, J20, Tg-SwDI, Tg-SwDI/Nos2, Tg2576, R1.40, APPPS1, APP23, PDAPP, APP NL-G-F, TgCRND8, TASD-41, BRI-Apβ42A, PSAPP (Tg2576xPS1), APPswe/PSEN1dE9, 2xKI, TAPP (Tg2576xJNPL3), hTau, PS1M146V, rTg4510, rTg4510xCamk2a-tTA, PS19, rTg4510xNop-tTA, GFAP-apoE4, Apoe^{tm3(APoE*4)}, APP.PS1/TRE4 and ApoE knock-out or knock-in mouse lines. (See Onos et al., Brain Res Bull. 2016; 122:1-11; Hall and Roberson, Brain Res Bull. 2012; 88(1): 3-12; Elder et al., Mt Sinai J Med. 2010; 77(1): 69-81, the contents of which are herein incorporated by reference in their entirety).

[0581] Tau transgenic mouse models overexpress wild-type or mutant human tau protein. More than 20 lines have been generated that contain different tau mutations (See Table 2 of Denk and Wade-Martins, Neurobiol Aging. 2009; 30(1): 1-13, the contents of which are herein incorporated by reference in their entirety). These are mutations present in patients with tauopathies and/or Alzheimer's Disease, including G272V, P301L, P301S, N297K, V337M, and R406W. The P301S transgenic mice express the human tau protein containing the P30 S mutation. One P30 S model (4R/ON tau under the control of the Thy1.2 promoter), created by Allen et al., exhibits similar characteristics to human tauopathies including filament accumulation of hyperphosphorylated tau, neuronal degeneration, and neuroinflammation. In addition, these mice develop a pronounced motor phenotype by 5-6 months of age (Allen et al., J Neurosci. 2002; 22(21):9340-51; Bellucci et al., Am J Pathol. 2004:165(5):1643-52, the contents of which are herein incorporated by reference in their entirety). Another P301 S mouse line (4R/IN tau under the control of the mouse prion promoter), created by Yoshiyama et al., displays hippocampal synapse loss, impaired synaptic function and concomitant microglial activation by 3-6 months of age. The animals also showed pathological hyperphosphorylated tau accumulations, neuronal loss, as well as hippocampal and entorhinal cortical atrophy by 9-12 months of age (Yoshiyama et al., Neuron. 2007; 53(3):337-51, the contents of which are herein incorporated by reference in their entirety).

[0582] APOE knock-in mice express human isoforms of APOE. In some cases, the human APOE genes were engineered in to replace the endogenous mouse APOE alleles (targeted replacement). These targeted placement (TR) models of ApoE2, ApoE3 or ApoE4 were developed in the laboratory of Nobuya Maeda (Sullivan et al., J Clin Invest. 1998; 102(1):130-5; Sullivan et al., J Biol Chem. 1997; 272(29):17972-80; Knouff et al., J Clin Invest. 1999; 103(11):1579-86, the contents of which are herein incorporated by reference in their entirety) and characterized in many studies. The ApoE TR mice differ on spatial memory performance and avoidance behavior. ApoE4-TR mice show cognitive and synaptic plasticity impairment compared to ApoE3-TR mice. In addition, ApoE4-TR mice exhibit anatomical and functional abnormalities in the hippocampus and the amygdala (Grootendorst, Behav Brain Res. 2005; 159(1):1-14; Bour et al., Behav Brain Res. 2008; 193(2):174-82, the contents of which are herein incorporated by reference in their entirety).

[0583] In one embodiment, an AAV-ApoE2 particle may be administered to PDAPP or APP.PS1/TRE4 mice as described in Zhao et al 2016 Neurobiol Aging 159-172, the contents of which are herein incorporated by reference in their entirety. Intracerebral or intrathalamic administration of AAV-ApoE2 (AAV9-CAG-APOE2 or AAVrh.10-CAG-APOE2) showed significant decreases in brain Aβ (oligomeric, soluble and insoluble), amyloid deposition and amyloid pathology, as determined by immunohistochemistry. ELISA or Western blot. More specifically, AAV preparations (2 μL, 1.0×10¹⁰ vg) were bilaterally injected by stereotactic surgery into either the hippocampus or the thalamus of adult mice at a rate of 0.2 μL/min and allowed to express for 8 weeks prior to tissue collection for post-mortem analysis. Lower doses of AAV-ApoE2, or delivery at a late stage of pathology, proved to be less effective.

### Frontotemporal Dementia (FTD)

[0584] Frontotemporal Dementia (FTD), also known as frontotemporal degeneration or Pick's disease, refers to a group of disorders which are caused by progressive nerve cell loss in the brain. This nerve cell loss can cause a loss of function in the frontal and/or temporal lobes of the brain. There are about 45,000 people in the United States who have FTD and the majority are between 45 and 65.

[0585] There are three subtypes of FTD, behavior variant frontotemporal dementia (bvFTD), primary progressive aphasia (PPA) and disturbances of motor function. Subjects with bvFTD tend to have major changes in personality, interpersonal relationships and conduct and the nerve loss is most prominent in areas that control conduct, empathy, foresight, and judgment. PPA affects language skills, speaking, writing, and comprehension. Both bvFTD and PPA are less common than AD in those over the age of 65, however bvFTD and PPA are nearly as common as AD in those between 45 and 65.

[0586] A mutation of tau is genetically associated with those subjects who have FTD.

### Amyotrophic Lateral Sclerosis (ALS)

[0587] Amyotrophic Lateral Sclerosis (ALS), also known as Lou Gehrig's disease or classical motor neuron disease, is a rapidly progressive and fatal neurological disease. ALS is associated with cell degeneration and death of upper and lower motor neurons, leading to disablement of muscle movement, weakening, wasting and loss of control over voluntary muscle movement. Early symptoms include muscle weakness of hands, legs and swallowing muscles, eventually progressing to inability to breathe due to diaphragm failure. According to Centers for Disease Control and Prevention (CDC), ALS affects an estimated 12, 000-15, 000 individuals in the US. About 5-10% of cases are familial.

[0588] ALS, as other non-infectious neurodegenerative diseases, has been characterized by presence of misfolded proteins, including, but not limited to, tau, C9orf72, TARDBP, or SOD1 (superoxide dismutase 1 protein), and myelin associated inhibitors and their receptors, (see, e.g., Krishnamurthy and Sigurdsson, 2011, N Biotechnol. 28(5):511-7, and Musaro, 2013, FEBS J.; 280(17):4315-22, Freibaum and Taylor, 2017, Front Mol Neurosci. 10(35):1-9, and references therein). Familial ALS has been associated with mutations of TAR DNA-binding protein 43 (TDP-43) and RNA-binding protein FUS/TLS. Some proteins have been identified to slow down progression of ALS, such as, but not limited, to growth factors, e.g. insulin-like growth factor 1 (IGF-1), glial cell line-derived growth factor, brain-derived growth factor, vascular endothelial growth factor and ciliary neurotrophic factor, or growth factors promoting muscle growth, e.g. myostatin.

[0589] As of today, there is no prevention or cure for ALS. FDA approved drug niluzole has been approved to prolong life expectancy, but does not have an effect on symptoms. Additionally, drugs and medical devices are available to tolerate pain and attacks associated with ALS. There remains a need for therapy affecting the underlying pathophysiology.

[0590] In some embodiment, methods of the present disclosure may be used to treat subjects suffering from ALS. In some cases, methods of the present disclosure may be used to treat subjects suspected of developing ALS.

[0591] AAV Particles and methods of using the AAV particles described in the present disclosure may be used to prevent, manage and/or treat ALS. As non-limiting examples, the AAV particles described herein may be used for the treatment, prevention or management of ALS and/or may comprise modulatory polynucleotides targeting SOD1, C9orf72, TARDBP and/or Tau.

### Huntington's Disease

[0592] Huntington's disease (HD) is a rare, inherited disorder causing degeneration of neurons in the motor control region of the brain, as well as other areas. Typical symptoms of the disease include uncontrolled movements (chorea), abnormal postures, impaired coordination, slurred speech and difficulty of feeding and swallowing accompanied by changes in behavior, judgment and cognition. HD is caused by mutations in the gene associated with the huntingtin (HT) protein. The mutation causes the (CAG) blocks of DNA to repeat abnormally. HD affects approximately 30, 000 individuals in the US.

[0593] HD is characterized by mutations of the huntingtin (HTT) protein with abnormal expansions of polyglutamine tracts, e.g. expansion of the length of glutamine residues encoded by CAG repeats. The expansion threshold for occurrence of the disease is considered to be approximately 35-40 residues. HD is also associated with beta sheet rich aggregates in striatal neurons formed by N-terminal regions of HTT. The expansions and aggregates lead to gradual loss of neurons as HD progresses. Additionally, the cell death in HD is associated with death receptor 6 (DR6) which is known to induce apoptosis.

[0594] As of today, there is no therapy or cure, to prevent the progression of the disease. Drug therapies available are aimed at management of the symptoms. For example, the FDA has approved tetrabenazine to be prescribed for prevention of chorea. Additionally, e.g. antipsychotic drugs may help to control delusions, hallucinations and violent outbursts. There remains a need for therapy affecting the underlying pathophysiology.

[0595] In some embodiment, methods of the present disclosure may be used to treat subjects suffering from HD. In some cases, methods of the present disclosure may be used to treat subjects suspected of developing HD.

[0596] AAV particles and methods of using the AAV particles described in the present disclosure may be used to prevent, manage and/or treat HD. As a non-limiting example, the AAV particles of the present disclosure used to treat, prevent and/or manage HD may comprise a modulatory polynucleotides targeting HTT, wherein the modulatory polynucleotides are siRNA duplexes or nucleic acids encoding siRNA duplexes or encoded dsRNA.

### Parkinson's Disease

[0597] Parkinson's Disease (PD) is a progressive disorder of the nervous system affecting especially the substantia nigra of the brain. PD develops as a result of the loss of dopamine producing brain cells. Typical early symptoms of PD include shaking or trembling of a limb, e.g. hands, arms, legs, feet and face. Additional characteristic symptoms are stiffness of the limbs and torso, slow movement or an inability to move, impaired balance and coordination, cognitive changes, and psychiatric conditions e.g. depression and visual hallucinations. PD has both familial and idiopathic forms and it is suggested to be linked to genetic and environmental causes. PD affects more than 4 million people worldwide. In the US, approximately 60, 000 cases are identified annually. Generally, PD begins at the age of 50 or older. An early-onset form of the condition begins at age younger than 50, and juvenile-onset PD begins before the age of 20.

[0598] Death of dopamine producing brain cells related to PD has been associated with aggregation, deposition and dysfunction of alpha-synuclein protein (see, e.g. Marques and Outeiro, 2012, Cell Death Dis. 3:e350, Jenner, 1989, J Neurol Neurosurg Psychiatry. Special Supplement, 22-28, and references therein). Studies have suggested that alpha-synuclein has a role in presynaptic signaling, membrane trafficking and regulation of dopamine release and transport. Alpha-synuclein aggregates, e.g. in forms of oligomers, have been suggested to be species responsible for neuronal dysfunction and death. Mutations of the alpha-synuclein gene (SNCA) have been identified in the familial forms of PD, but also environmental factors, e.g. neurotoxin affect alpha-synuclein aggregation. Other suggested causes of brain cell death in PD are dysfunction of proteasomal and lysosomal systems, reduced mitochondrial activity.

[0599] PD is related to other diseases related to alpha-synuclein aggregation, referred to as “synucleinopathies.” Such diseases include, but are not limited to, Parkinson's Disease Dementia (PDD), multiple system atrophy (MSA), dementia with Lewy bodies, juvenile-onset generalized neuroaxonal dystrophy (Hallervorden-Spaz disease), pure autonomic failure (PAF), neurodegeneration with brain iron accumulation type-1 (NBIA-1) and combined Alzheimer's and Parkinson's disease.

[0600] As of today, no cure or preventative therapy for PD has been identified. A variety of drug therapies available provide symptomatic relief. Non-limiting examples of symptomatic medical treatments include carbidopa and levodopa combination reducing stiffness and slow movement, and anticholinergics to reduce trembling and stiffness. Other optional therapies include e.g. deep brain stimulation and surgery. There remains a need for therapy affecting the underlying pathophysiology.

[0601] In some embodiments, methods of the present disclosure may be used to treat subjects suffering from PD and other synucleinopathies. In some cases, methods of the present disclosure may be used to treat subjects suspected of developing PD and other synucleinopathies.

### Friedreich's Ataxia

[0602] Friedreich's Ataxia (FA) is an autosomal recessive inherited disease that causes progressive damage to the nervous system. See, Parkinson et al., Journal of Neurochemistry, 2013, 126 (Suppl. 1), 103-117, the contents of which are herein incorporated by reference in their entirety. Onset usually occurs at puberty, and always by age 25. See, Campuzano, et al., Science, 271.5254 (Mar. 8, 1996): 1423, the contents of which are herein incorporated by reference in their entirety. FA results from the degeneration of nervous tissue in the spinal cord due to reduced expression of the mitochondrial protein frataxin (FXN) in sensory neurons that are essential (through connections with the cerebellum) for directing muscle movement of the arms and legs. See, Koeppen, Amulf; J Neurol Sci., 2011, Apr. 15; 303(1-2): 1-12, the contents of which are herein incorporated by reference in their entirety. Initial symptoms include poor coordination such as gait disturbance, poor balance, leg weakness, decreased walking, impaired coordination, dysarthria, nystagmus, impaired sensation, kyphoscoliosis, and foot deformities. See, Parkinson et al., Journal of Neurochemistry, 2013, 126 (Suppl. 1), 103-117. The disease generally progresses until a wheelchair is required for mobility. Mortality often involves cardiac failure as a result of cardiac hypertrophy, see Tsou et al., J Neurol Sci. 2011 Aug. 15; 307(1-2):46-9. Incidence of FA among the Caucasian populations is between about 1 in 20,000 and about 1 in 50.000, with a deduced carrier frequency of about 1 in 120 in European populations. See, Nageshwaran and Festenstein, Frontiers in Neurology, Vol. 6, Art. 262 (2015); Campuzano, et al., Science, 271.5254 (Mar. 8, 1996): 1423, the contents of each of which are herein incorporated by reference in their entirety.

[0603] The expansion of an intronic GAA triplet repeat in the FXN gene is the genetic cause of reduced expression of frataxin resulting in FA. See, Parkinson et al., Journal of Neurochemistry, 2013, 126 (Suppl. 1), 103-117. Over time the deficiency causes the aforementioned symptoms, as well as frequent fatigue due to effects on cellular metabolism.

[0604] Currently, no effective treatments exist for FA and patients are most often simply monitored for symptom management. Consequently, there remains a long felt need in the art to develop pharmaceutical compositions and methods for the treatment of FXN related disorders and to ameliorate deficiencies of the protein in patients afflicted with FA.

[0605] Delivery of AAV particles described herein may be used to treat subjects suffering from Friedreich's Ataxia. In some cases, methods of the present disclosure may be used to treat subjects suspected of developing Friedreich's Ataxia. Delivery of AAV particles may result in increased frataxin protein. Further, this increase in frataxin protein may or may not be associated with improvements in mobility.

[0606] In one embodiment, delivery of AAV particles of the disclosure, comprising frataxin polynucleotides, may be used to treat subjects suffering from Friedreich's Ataxia.

[0607] In one embodiment, the AAV particles of the disclosure, comprising frataxin polynucleotides, may be delivered to the dentate nucleus of the cerebellum, brainstem nuclei and/or Clarke's column of the spinal cord. Delivery to one or more of these regions may treat and/or reduce the effects of Friedreich's Ataxia in a subject.

[0608] In one embodiment, the AAV particles of the disclosure, comprising frataxin polynucleotides, may be delivered by intravenous administration to the central nervous system, peripheral nervous system, and/or peripheral organs (e.g., but not limited to, to the heart) for the treatment of Friedreich's Ataxia in a subject.

### Methods of Treatment of Neurological Disease

### AAV Particles Encoding Protein Payloads

[0609] Provided in the present disclosure are methods for introducing AAV particles into cells, the method comprising introducing into said cells any of the vectors in an amount sufficient for an increase in the production of payloads (e.g., target mRNA and dsRNA duplexes) to occur. In some aspects, the cells may be muscle cells, stem cells, neurons such as but not limited to, motor, hippocampal, entorhinal, thalamic, cortical neurons, motor neurons or sensory neurons and glial cells such as astrocytes or microglia.

[0610] Disclosed herein are methods for treating neurological disease associated with insufficient function/presence of a target protein (e.g., ApoE, FXN) in a subject in need of treatment. The method optionally comprises administering to the subject a therapeutically effective amount of a composition comprising AAV particles as described herein. As a non-limiting example, the AAV particles can increase target gene expression, increase target protein production, and thus reduce one or more symptoms of neurological disease in the subject such that the subject is therapeutically treated.

[0611] In some embodiments, the AAV particle of the present disclosure comprising a nucleic acid encoding a protein payload comprises an AAV capsid that allows for transmission across the blood brain barrier upon administration of the AAV particle. In one example, the AAV capsid is VOY101 and in another example, the AAV capsid is VOY201. In one example, the AAV capsid is VOY801 and in another example, the AAV capsid is VOY1101.

[0612] In one embodiment, the composition comprising the AAV particles of the present disclosure is administered to the central nervous system of the subject via systemic administration. In one embodiment, the systemic administration is intravenous injection.

[0613] In one embodiment, composition comprising the AAV particles of the present disclosure is administered to the central nervous system of the subject via intracarotid arterial delivery.

[0614] In some embodiments, the composition comprising the AAV particles of the present disclosure is administered to the central nervous system of the subject. In other embodiments, the composition comprising the AAV particles of the present disclosure is administered to a tissue of a subject (e.g., brain of the subject).

[0615] In one embodiment, the composition comprising the AAV particles of the present disclosure is administered to the central nervous system of the subject via intraparenchymal injection. Non-limiting examples of intraparenchymal injections include intrathalamic, intrastriatal, intrahippocampal or targeting the entorhinal cortex.

[0616] In one embodiment, the composition comprising the AAV particles of the present disclosure is administered to the central nervous system of the subject via intraparenchymal injection and intrathecal injection.

[0617] In one embodiment, the AAV particles of the present disclosure may be delivered into specific types of targeted cells, including, but not limited to, hippocampal, cortical, motor or entorhinal neurons; glial cells including oligodendrocytes, astrocytes and microglia; and/or other cells surrounding neurons such as immune cells (e.g., T cells).

[0618] In one embodiment, the AAV particles of the present disclosure may be delivered to neurons in the striatum and/or cortex.

[0619] In some embodiments, the AAV particles of the present disclosure may be used as a therapy for neurological disease.

[0620] In some embodiments, the AAV particles of the present disclosure may be used as a therapy for tauopathies.

[0621] In some embodiments, the AAV particles of the present disclosure may be used as a therapy for Alzheimer's Disease.

[0622] In some embodiments, the AAV particles of the present disclosure may be used as a therapy for Amyotrophic Lateral Sclerosis.

[0623] In some embodiments, the AAV particles of the present disclosure may be used as a therapy for Huntington's Disease.

[0624] In some embodiments, the AAV particles of the present disclosure may be used as a therapy for Parkinson's Disease.

[0625] In some embodiments, the AAV particles of the present disclosure may be used as a therapy for Friedreich's Ataxia.

[0626] In some embodiments, the AAV particles of the present disclosure may be used to increase target protein expression in astrocytes in order to treat a neurological disease. Target protein in astrocytes may be increased by 5%, 10%, 15%, 20%, 25%, 30%, 35%, 40%, 45%, 50%, 55%, 60%, 65%, 70%, 75%, 80%, 85%, 90%, 95%, or more than 95%, 5-15%, 5-20%, 5-25%, 5-30%, 5-35%, 5-40%, 5-45%, 5-50%, 5-55%, 5-60%, 5-65%, 5-70%, 5-75%, 5-80%, 5-85%, 5-90%, 5-95%, 10-20%, 10-25%, 10-30%, 10-35%, 10-40%, 10-45%, 10-50%, 10-55%, 10-60%, 10-65%, 10-70%, 10-75%, 10-80%, 10-85%, 10-90%, 10-95%, 15-25%, 15-30%, 15-35%, 15-40%, 15-45%, 15-50%, 15-55%, 15-60%, 15-65%, 15-70%, 15-75%, 15-80%, 15-85%, 15-90%, 15-95%, 20-30%, 20-35%, 20-40%, 20-45%, 20-50%, 20-55%, 20-60%, 20-65%, 20-70%, 20-75%, 20-80%, 20-85%, 20-90%, 20-95%, 25-35%, 25-40%, 25-45%, 25-50%, 25-55%, 25-60%, 25-65%, 25-70%, 25-75%, 25-80%, 25-85%, 25-90%, 25-95%, 30-40%, 30-45%, 30-50%, 30-55%, 30-60%, 30-65%, 30-70%, 30-75%, 30-80%, 30-85%, 30-90%, 30-95%, 35-45%, 35-50%, 35-55%, 35-60%, 35-65%, 35-70%, 35-75%, 35-80%, 35-85%, 35-90%, 35-95%, 40-50%, 40-55%, 40-60%, 40-65%, 40-70%, 40-75%, 40-80%, 40-85%, 40-90%, 40-95%, 45-55%, 45-60%, 45-65%, 45-70%, 45-75%, 45-80%, 45-85%, 45-90%, 45-95%, 50-60%, 50-65%, 50-70%, 50-75%, 50-80%, 50-85%, 50-90%, 50-95%, 55-65%, 55-70%, 55-75%, 55-80%, 55-85%, 55-90%, 55-95%, 60-70%, 60-75%, 60-80%, 60-85%, 60-90%, 60-95%, 65-75%, 65-80%, 65-85%, 65-90%, 65-95%, 70-80%, 70-85%, 70-90%, 70-95%, 75-85%, 75-90%, 75-95%, 80-90%, 80-95%, or 90-95%.

[0627] In some embodiments, the AAV particles may be used to increase target protein in microglia. The increase of target protein in microglia may be, independently, increased by 5%, 10%, 15%, 20%, 25% 30%, 35%, 40%, 45%, 50%, 55%, 60%, 65%, 70%, 75%, 80%, 85%, 90%, 95%, or more than 95%, 5-15%, 5-20%, 5-25%, 5-30%, 5-35%, 540%, 5-45%, 5-50%, 5-55%, 5-60%, 5-65%, 5-70%, 5-75%, 5-80%, 5-85%, 5-90%, 5-95%, 10-20%, 10-25%, 10-30%, 10-35%, 10-40%, 10-45%, 10-50%, 10-55%, 10-60%, 10-65%, 10-70%, 10-75%, 10-80%, 10-85%, 10-90%, 10-95%, 15-25%, 15-30%, 15-35%, 15-40%, 15-45%, 15-50%, 15-55%, 15-60%, 15-65%, 15-70%, 15-75%, 15-80%, 15-85%, 15-90%, 15-95%, 20-30%, 20-35%, 20-40%, 20-45%, 20-50%, 20-55%, 20-60%, 20-65%, 20-70%, 20-75%, 20-80%, 20-85%, 20-90%, 20-95%, 25-35%, 25-40%, 25-45%, 25-50%, 25-55%, 25-60%, 25-65%, 25-70%, 25-75%, 25-80%, 25-85%, 25-90%, 25-95%, 30-40%, 30-45%, 30-50%, 30-55%, 30-60%, 30-65%, 30-70%, 30-75%, 30-80%, 30-85%, 30-90%, 30-95%, 35-45%, 35-50%, 35-55%, 35-60%, 35-65%, 35-70%, 35-75%, 35-80%, 35-85%, 35-90%, 35-95%, 40-50%, 40-55%, 40-60%, 40-65%, 40-70%, 40-75%, 40-80%, 40-85%, 40-90%, 40-95%, 45-55%, 45-60%, 45-65%, 45-70%, 45-75%, 45-80%, 45-85%, 45-90%, 45-95%, 50-60%, 50-65%, 50-70%, 50-75%, 50-80%, 50-85%, 50-90%, 50-95%, 55-65%, 55-70%, 55-75%, 55-80%, 55-85%, 55-90%, 55-95%, 60-70%, 60-75%, 60-80%, 60-85%, 60-90%, 60-95%, 65-75%, 65-80%, 65-85%, 65-90%, 65-95%, 70-80%, 70-85%, 70-90%, 70-95%, 75-85%, 75-90%, 75-95%, 80-90%, 80-95%, or 90-95%.

[0628] In some embodiments, the AAV particles may be used to increase target protein in cortical neurons. The increase of target protein in the cortical neurons may be, independently, increased by 5%, 10%, 15%, 20%, 25%, 30%, 35%, 40%, 45%, 50%, 55%, 60%, 65%, 70%, 75%, 80%, 85%, 90%, 95%, or more than 95%, 5-15%, 5-20%, 5-25%, 5-30%, 5-35%, 5-40%, 5-45%, 5-50%, 5-55%, 5-60%, 5-65%, 5-70%, 5-75%, 5-80%, 5-85%, 5-90%, 5-95%, 10-20%, 10-25%, 10-30%, 10-35%, 10-40%, 10-45%, 10-50%, 10-55%, 10-60%, 10-65%, 10-70%, 10-75%, 10-80%, 10-85%, 10-90%, 10-95%, 15-25%, 15-30%, 15-35%, 1540%, 15-45%, 15-50%, 15-55%, 15-60%, 15-65%, 15-70%, 15-75%, 15-80%, 15-85%, 15-90%, 15-95%, 20-30%, 20-35%, 2040%, 20-45%, 20-50%, 20-55%, 20-60%, 20-65%, 20-70%, 20-75%, 20-80%, 20-85%, 20-90%, 20-95%, 25-35%, 25-40%, 25-45%, 25-50%, 25-55/0, 25-60%, 25-65%, 25-70%, 25-75%, 25-80%, 25-85%, 25-90%, 25-95%, 30-40%, 30-45%, 30-50%, 30-55%, 30-60%, 30-65%, 30-70%, 30-75%, 30-80%, 30-85%, 30-90%, 30-95%, 35-45%, 35-50%, 35-55%, 35-60%, 35-65%, 35-70%, 35-75%, 35-80%, 35-85%, 35-90%, 35-95%, 40-50%, 40-55%, 40-60%, 40-65%, 40-70%, 40-75%, 40-80%, 40-85%, 40-90%, 40-95%, 45-55%, 45-60%, 45-65%, 45-70%, 45-75%, 45-80%, 45-85%, 45-90/%, 45-95%, 50-60%, 50-65%, 50-70%, 50-75%, 50-80%, 50-85%, 50-90%, 50-95%, 55-65% 55-70%, 55-75%, 55-80%, 55-85%, 55-90%, 55-95%, 60-70%, 60-75%, 60-80%, 60-85%, 60-90°/%, 60-95%, 65-75%, 65-80%, 65-85%, 65-90%, 65-95%, 70-80%, 70-85%, 70-90%, 70-95%, 75-85%, 75-90%, 75-95%, 80-90%, 80-95%, or 90-95%.

[0629] In some embodiments, the AAV particles may be used to increase target protein in hippocampal neurons. The increase of target protein in the hippocampal neurons may be, independently, increased by 5%, 10%, 15%, 20%, 25%, 30%, 35%, 40%, 45%, 50%, 55%, 60%, 65%, 70%, 75%, 80%, 85%, 90%, 95%, or more than 95%, 5-15%, 5-20%, 5-25%, 5-30%, 5-35%, 5-40%, 5-45%, 5-50%, 5-55%, 5-60%, 5-65%, 5-70%, 5-75%, 5-80%, 5-85%, 5-90%, 5-95%, 10-20%, 10-25%, 10-30%, 10-35%, 10-40%, 10-45%, 10-50%, 10-55%, 10-60%, 10-65%, 10-70%, 10-75%, 10-80%, 10-85%, 10-90%, 10-95%, 15-25%, 15-30%, 15-35%, 15-40%, 15-45%, 15-50%, 15-55%, 15-60%, 15-65%, 15-70%, 15-75%, 15-80%, 15-85%, 15-90%, 15-95%, 20-30%, 20-35%, 20-40%, 20-45%, 20-50%, 20-55%, 20-60%, 20-65%, 20-70%, 20-75%, 20-80%, 20-85%, 20-90%, 20-95%, 25-35%, 25-40%, 25-45%, 25-50%, 25-55%, 25-60%, 25-65%, 25-70%, 25-75%, 25-80%, 25-85%, 25-90%, 25-95%, 30-40%, 30-45%, 30-50%, 30-55%, 30-60%, 30-65%, 30-70%, 30-75%, 30-80%, 30-85%, 30-90%, 30-95%, 35-45%, 35-50%, 35-55%, 35-60%, 35-65%, 35-70%, 35-75%, 35-80%, 35-85%, 35-90%, 35-95%, 40-50%, 40-55%, 40-60%, 40-65%, 40-70%, 40-75%, 40-80%, 40-85%, 40-90%, 40-95%, 45-55%, 45-60%, 45-65%, 45-70%, 45-75%, 45-80%, 45-85%, 45-90%, 45-95%, 50-60%, 50-65%, 50-70%, 50-75%, 50-80%, 50-85%, 50-90%, 50-95%, 55-65%, 55-70%, 55-75%, 55-80%, 55-85%, 55-90%, 55-95%, 60-70%, 60-75%, 60-80%, 60-85%, 60-90%, 60-95%, 65-75%, 65-80%, 65-85%, 65-90%, 65-95%, 70-80%, 70-85%, 70-90%, 70-95%, 75-85%, 75-90%, 75-95%, 80-90%, 80-95%, or 90-95%.

[0630] In some embodiments, the AAV particles may be used to increase target protein in DRG and/or sympathetic neurons. The increase of target protein in the DRG and/or sympathetic neurons may be, independently, increased by 5%, 10%, 15%, 20%, 25%, 30%, 35%, 40%, 45%, 50%, 55%, 60%, 65%, 70%, 75%, 80%, 85%, 90%, 95%, or more than 95%, 5-15%, 5-20%, 5-25%, 5-30%, 5-35%, 5-40%, 5-45%, 5-50%, 5-55%, 5-60% 5-65%, 5-70%, 5-75%, 5-80%, 5-85%, 5-90%, 5-95%, 10-20%, 10-25%, 10-30%, 10-35%, 1040%, 10-45%, 10-50%, 10-55%, 10-60%, 10-65%, 10-70%, 10-75%, 10-80%, 10-85%, 10-90%, 10-95%, 15-25%, 15-30%, 15-35%, 1540%, 1545%, 15-50%, 15-55%, 15-60%, 15-65%, 15-70%, 15-75%, 15-80%, 15-85%, 15-90%, 15-95%, 20-30%, 20-35%, 2040%, 20-45%, 20-50%, 20-55%, 20-60%, 20-65%, 20-70%, 20-75%, 20-80%, 20-85%, 20-90%, 20-95%, 25-35%, 25-40%, 2545%, 25-50%, 25-55%, 25-60%, 25-65%, 25-70%, 25-75%, 25-80%, 25-85%, 25-90%, 25-95%, 30-40%, 30-45%, 30-50%, 30-55%, 30-60%, 30-65%, 30-70%, 30-75%, 30-80%, 30-85%, 30-90%, 30-95%, 35-45%, 35-50%, 35-55%, 35-60%, 35-65%, 35-70%, 35-75%, 35-80%, 35-85%, 35-90%, 35-95%, 40-50%, 40-55%, 40-60%, 40-65%, 40-70%, 40-75%, 40-80%, 40-85%, 40-90%, 40-95%, 45-55%, 45-60%, 45-65%, 45-70%, 45-75%, 45-80%, 45-85%, 45-90%, 45-95%, 50-60%, 50-65%, 50-70%, 50-75%, 50-80%, 50-85%, 50-90%, 50-95%, 55-65%, 55-70%, 55-75%, 55-80%, 55-85%, 55-90%, 55-95%, 60-70%, 60-75%, 60-80%, 60-85%, 60-90%, 60-95%, 65-75%, 65-80%, 65-85%, 65-90%, 65-95%, 70-80%, 70-85%, 70-90%, 70-95%, 75-85%, 75-90%, 75-95%, 80-90%, 80-95%, or 90-95%.

[0631] In some embodiments, the AAV particles of the present disclosure may be used to increase target protein in sensory neurons in order to treat neurological disease. Target protein in sensory neurons may be increased by 5%, 10%, 15%, 20%, 25%, 30%, 35%, 40%, 45%, 50%, 55%, 60%, 65%, 70%, 75%, 80%, 85%, 90%, 95%, or more than 95%, 5-15%, 5-20%, 5-25%, 5-30%, 5-35%, 5-40%, 5-45%, 5-50%, 5-55%, 5-60%, 5-65%, 5-70%, 5-75%, 5-80%, 5-85%, 5-90%, 5-95%, 10-20%, 10-25%, 10-30%, 10-35%, 10-40%, 10-45%, 10-50%, 10-55%, 10-60%, 10-65%, 10-70%, 10-75%, 10-80%, 10-85%, 10-90%, 10-95%, 15-25%, 15-30%, 15-35%, 1540%, 1545%, 15-50%, 15-55%, 15-60%, 15-65%, 15-70%, 15-75%, 15-80%, 15-85%, 15-90%, 15-95%, 20-30%, 20-35%, 20-40%, 20-45%, 20-50%, 20-55%, 20-60%, 20-65%, 20-70%, 20-75%, 20-80%, 20-85%, 20-90%, 20-95%, 25-35%, 25-40%, 25-45%, 25-50%, 25-55%, 25-60%, 25-65%, 25-70%, 25-75%, 25-80%, 25-85%, 25-90%, 25-95%, 30-40%, 3045%, 30-50%, 30-55%, 30-60%, 30-65%, 30-70%, 30-75%, 30-80%, 30-85%, 30-90%, 30-95%, 3545%, 35-50%, 35-55%, 35-60%, 35-65%, 35-70%, 35-75%, 35-80%, 35-85%, 35-90%, 35-95%, 40-50%, 40-55%, 40-60%, 40-65%, 40-70%, 40-75%, 40-80%, 40-85%, 40-90%, 40-95%, 45-55%, 45-60%, 45-65%, 45-70%, 45-75%, 45-80%, 45-85%, 45-90%, 45-95%, 50-60%, 50-65%, 50-70%, 50-75%, 50-80%, 50-85%, 50-90%, 50-95%, 55-65%, 55-70%, 55-75%, 55-80%, 55-85%, 55-90%, 55-95%, 60-70%, 60-75%, 60-80%, 60-85%, 60-90%, 60-95%, 65-75%, 65-80%, 65-85%, 65-90%, 65-95%, 70-80%, 70-85%, 70-90%, 70-95%, 75-85%, 75-90%, 75-95%, 80-90%, 80-95%, or 90-95%.

[0632] In some embodiments, the AAV particles of the present disclosure may be used to increase target protein and reduce symptoms of neurological disease in a subject. The increase of target protein and/or the reduction of symptoms of neurological disease may be, independently, altered (increased for the production of target protein and reduced for the symptoms of neurological disease) by 5%, 10%, 15%, 20%, 25%, 30%, 35%, 40%, 45%, 50%, 55%, 60%, 65%, 70%, 75%, 80%, 85%, 90%, 95%, or more than 95%, 5-15%, 5-20%, 5-25%, 5-30%, 5-35/%, 5-40%, 5-45%, 5-50%, 5-55%, 5-60%, 5-65%, 5-70%, 5-75%, 5-80%, 5-85%, 5-90%, 5-95%, 10-20%, 10-25%, 10-30%, 10-35%, 10-40%, 10-45%, 10-50%, 10-55%, 10-60%, 10-65%, 10-70%, 10-75%, 10-80%, 10-85%, 10-90%, 10-95%, 15-25%, 15-30%, 15-35%, 15-40%, 15-45%, 15-50%, 15-55%, 15-60%, 15-65%, 15-70%, 15-75%, 15-80%, 15-85%, 15-90%, 15-95%, 20-30%, 20-35%, 20-40%, 20-45%, 20-50%, 20-55%, 20-60%, 20-65%, 20-70%, 20-75%, 20-80%, 20-85%, 20-90%, 20-95%, 25-35%, 25-40%, 25-45%, 25-50%, 25-55%, 25-60%, 25-65%, 25-70%, 25-75%, 25-80%, 25-85%, 25-90%, 25-95%, 30-40%, 30-45%, 30-50%, 30-55%, 30-60%, 30-65%, 30-70%, 30-75%, 30-80%, 30-85%, 30-90%, 30-95%, 35-45%, 35-50%, 35-55%, 35-60%, 35-65%, 35-70%, 35-75/0, 35-80%, 35-85%, 35-90%, 35-95%, 40-50%, 40-55%, 40-60%, 40-65%, 40-70%, 40-75%, 40-80%, 40-85%, 40-90%, 40-95%, 45-55%, 45-60%, 45-65%, 45-70%, 45-75%, 45-80%, 45-85%, 45-90%, 45-95%, 50-60%, 50-65%, 50-70%, 50-75%, 50-80%, 50-85%, 50-90%, 50-95%, 55-65%, 55-70%, 55-75%, 55-80%, 55-85%, 55-90%, 55-95%, 60-70%, 60-75%, 60-80%, 60-85%, 60-90%, 60-95%, 65-75%, 65-80%, 65-85%, 65-90%, 65-95%, 70-80%, 70-85%, 70-90%, 70-95%, 75-85%, 75-90%, 75-95%, 80-90%, 80-95%, or 90-95%.

[0633] In one embodiment, the AAV particles of the present disclosure may be used to reduce the decline of functional capacity and activities of daily living as measured by a standard evaluation system such as, but not limited to, the total functional capacity (TFC) scale.

[0634] In one embodiment, the AAV particles of the present disclosure may be used to improve performance on any assessment used to measure symptoms of neurological disease. Such assessments include, but are not limited to ADAS-cog (Alzheimer Disease Assessment Scale—cognitive), MMSE (Mini-Mental State Examination), GDS (Geriatric Depression Scale). FAQ (Functional Activities Questionnaire), ADL (Activities of Daily Living), GPCOG (General Practitioner Assessment of Cognition), Mini-Cog, AMTS (Abbreviated Mental Test Score), Clock-drawing test, 6-CIT (6-item Cognitive Impairment Test), TYM (Test Your Memory), MoCa (Montreal Cognitive Assessment), ACE-R (Addenbrookes Cognitive Assessment), MIS (Memory Impairment Screen), BADLS (Bristol Activities of Daily Living Scale), Barthel Index, Functional Independence Measure, Instrumental Activities of Daily Living, IQCODE (Informant Questionnaire on Cognitive Decline in the Elderly), Neuropsychiatric Inventory, The Cohen-Mansfield Agitation Inventory, BEHAVE-AD, EuroQol, Short Form-36 and/or MBR Caregiver Strain Instrument, or any of the other tests as described in Sheehan B Ther Adv Neurol Disord 5(6):349-358 (2012), the contents of which are herein incorporated by reference in their entirety.

[0635] In some embodiments, the present composition is administered as a solo therapeutic or as combination therapeutic for the treatment of neurological disease.

[0636] The AAV particles encoding the target protein may be used in combination with one or more other therapeutic agents. By “in combination with,” it is not intended to imply that the agents must be administered at the same time and/or formulated for delivery together, although these methods of delivery are within the scope of the present disclosure. Compositions can be administered concurrently with, prior to, or subsequent to, one or more other desired therapeutics or medical procedures. In general, each agent will be administered at a dose and/or on a time schedule determined for that agent.

[0637] Therapeutic agents that may be used in combination with the AAV particles of the present disclosure can be small molecule compounds which are antioxidants, anti-inflammatory agents, anti-apoptosis agents, calcium regulators, antiglutamatergic agents, structural protein inhibitors, compounds involved in muscle function, and compounds involved in metal ion regulation.

[0638] Compounds tested for treating neurological disease which may be used in combination with the AAV particles described herein include, but are not limited to, cholinesterase inhibitors (donepezil, rivastigmine, galantamine), NMDA receptor antagonists such as memantine, anti-psychotics, anti-depressants, anti-convulsants (e.g., sodium valproate and levetiracetam for myoclonus), secretase inhibitors, amyloid aggregation inhibitors, copper or zinc modulators, BACE inhibitors, inhibitors of tau aggregation, such as Methylene blue, phenothiazines, anthraquinones, n-phenylamines or rhodamines, microtubule stabilizers such as NAP, taxol or paclitaxel, kinase or phosphatase inhibitors such as those targeting GSK3p (lithium) or PP2A, immunization with Aβ peptides or tau phospho-epitopes, anti-tau or anti-amyloid antibodies, dopamine-depleting agents (e.g., tetrabenazine for chorea), benzodiazepines (e.g., clonazepam for myoclonus, chorea, dystonia, rigidity, and/or spasticity), amino acid precursors of dopamine (e.g., levodopa for rigidity), skeletal muscle relaxants (e.g., baclofen, tizanidine for rigidity and/or spasticity), inhibitors for acetylcholine release at the neuromuscular junction to cause muscle paralysis (e.g., botulinum toxin for bruxism and/or dystonia), atypical neuroleptics (e.g., olanzapine and quetiapine for psychosis and/or irritability, risperidone, sulpiride and haloperidol for psychosis, chorea and/or irritability, clozapine for treatment-resistant psychosis, aripiprazole for psychosis with prominent negative symptoms), selective serotonin reuptake inhibitors (SSRIs) (e.g., citalopram, fluoxetine, paroxetine, sertraline, mirtazapine, venlafaxine for depression, anxiety, obsessive compulsive behavior and/or irritability), hypnotics (e.g., xopiclone and/or zolpidem for altered sleep-wake cycle), anticonvulsants (e.g., sodium valproate and carbamazepine for mania or hypomania) and mood stabilizers (e.g., lithium for mania or hypomania).

[0639] Neurotrophic factors may be used in combination therapy with the AAV particles of the present disclosure for treating neurological disease. Generally, a neurotrophic factor is defined as a substance that promotes survival, growth, differentiation, proliferation and/or maturation of a neuron, or stimulates increased activity of a neuron. In some embodiments, the present methods further comprise delivery of one or more trophic factors into the subject in need of treatment. Trophic factors may include, but are not limited to, IGF-I, GDNF, BDNF, CTNF, VEGF, Colivelin, Xaliproden, Thyrotrophin-releasing hormone and ADNF, and variants thereof.

[0640] In one aspect, the AAV particle described herein may be co-administered with AAV particles expressing neurotrophic factors such as AAV-IGF-I (See e.g., Vincent et al., Neuromolecular medicine, 2004, 6, 79-85; the contents of which are incorporated herein by reference in their entirety) and AAV-GDNF (See e.g., Wang et al., J Neurosci., 2002, 22, 6920-6928; the contents of which are incorporated herein by reference in their entirety).

[0641] In some embodiments, the composition for treating neurological disease, described herein, is administered to the subject in need intravenously, intramuscularly, subcutaneously, intraperitoneally, intraparenchymally, intrathecally and/or intraventricularly, allowing the AAV particles to pass through one or both the blood-brain barrier and the blood spinal cord barrier. In some aspects, the method includes administering (e.g., intraparenchymal administration, intraventricular administration and/or intrathecally administration) directly to the central nervous system (CNS) of a subject (using, e.g., an infusion pump and/or a delivery scaffold) a therapeutically effective amount of a composition comprising AAV particles of the present disclosure. The AAV particles may be used to increase target gene expression, and/or reducing one or more symptoms of neurological disease in the subject such that the subject is therapeutically treated.

[0642] In one embodiment, administration of the AAV particles described herein to a subject may increase target protein levels in a subject. The target protein levels may be increased by about 30%, 40%, 50%, 60%, 70%, 80%, 85%, 90%, 95% and 100%, or at least 20-30%, 20-40%, 20-50%, 20-60%, 20-70%, 20-80%, 20-90%, 20-95%, 20-100%, 30-40%, 30-50%, 30-60%, 30-70%, 30-80%, 30-90%, 30-95%, 30-100%, 40-50%, 40-60%, 40-70%, 40-80%, 40-90%, 40-95%, 40-100%, 50-60%, 50-70%, 50-80%, 50-90%, 50-95%, 50-100%, 60-70%, 60-80%, 60-90%, 60-95%, 60-100%, 70-80%, 70-90%, 70-95%, 70-100%, 80-90%, 80-95%, 80-100%, 90-95%, 90-100% or 95-100% in a subject such as, but not limited to, the CNS, a region of the CNS, or a specific cell of the CNS of a subject. As a non-limiting example, the AAV particles may increase the protein levels of a target protein by at least 50%. As a non-limiting example, the AAV particles may increase the proteins levels of a target protein by at least 40%. As a non-limiting example, a subject may have an increase of 10% of target protein. As a non-limiting example, the AAV particles may increase the protein levels of a target protein by fold increases over baseline. In one embodiment, AAV particles lead to 5-6 times higher levels of a target protein.

[0643] In one embodiment, administration of the AAV particles described herein to a subject may increase the expression of a target protein in a subject. The expression of the target protein may be increased by about 30%, 40, 50%, 60%, 70%, 80%, 85%, 90%, 95% and 100%, or at least 20-30%, 20-40%, 20-50%, 20-60%, 20-70%, 20-80%, 20-90%, 20-95%, 20-100%, 30-40%, 30-50%, 30-60%, 30-70%, 30-80%, 30-90%, 30-95%, 30-100%, 40-50%, 40-60%, 40-70%, 40-80%, 40-90%, 40-95%, 40-100%, 50-60%, 50-70%, 50-80%, 50-90%, 50-95%, 50-100%, 60-70%, 60-80%, 60-90%, 60-95%, 60-100%, 70-80%, 70-90%, 70-95%, 70-100%, 80-90%, 80-95%, 80-100%, 90-950, 90-100% or 95-100% in a subject such as, but not limited to, the CNS, a region of the CNS, or a specific cell of the CNS of a subject. As a non-limiting example, the AAV particles may increase the expression of a target protein by at least 50%. As a non-limiting example, the AAV particles may increase the expression of a target protein by at least 40%.

[0644] In one embodiment, intravenous administration of the AAV particles described herein to a subject may increase the CNS expression of a target protein in a subject. The expression of the target protein may be increased by about 30%, 40%, 50%, 60%, 70%, 80%, 85%, 90%, 95% and 100%, or at least 20-30%, 20-40%, 20-50%, 20-60%, 20-70%, 20-80%, 20-90%, 20-95%, 20-100%, 30-40%, 30-50%, 30-60%, 30-70%, 30-80%, 30-90%, 30-95%, 30-100%, 40-50%, 40-60%, 40-70%, 40-80%, 40-90%, 40-95%, 40-100%, 50-60%, 50-70%, 50-80%, 50-90%, 50-95%, 50-100%, 60-70%, 60-80%, 60-90%, 60-95%, 60-100%, 70-80%, 70-90%, 70-95%, 70-100%, 80-90%, 80-95%, 80-100%, 90-95%, 90-100% or 95-100% in a subject such as, but not limited to, the CNS, a region of the CNS, or a specific cell of the CNS of a subject. As a non-limiting example, the AAV particles may increase the expression of a target protein in the CNS by at least 50%. As a non-limiting example, the AAV particles may increase the expression of a target protein in the CNS by at least 40%.

[0645] In one embodiment, administration of the AAV particles to a subject will increase the expression of a target protein in a subject and the increase of the expression of the target protein will reduce the effects and/or symptoms of neurological disease in a subject.

### AAV Particles Comprising Modulatory Polynucleotides

[0646] Provided in the present disclosure are methods for introducing the AAV particles, comprising a nucleic acid sequence encoding the siRNA molecules of the present disclosure into cells, the method comprising introducing into said cells any of the vectors in an amount sufficient for degradation of a target mRNA to occur, thereby activating target-specific RNAi in the cells. In some aspects, the cells may be muscle cells, stem cells, neurons such as but not limited to, motor, hippocampal, entorhinal, thalamic or cortical neurons, and glial cells such as astrocytes or microglia.

[0647] Disclosed in the present disclosure are methods for treating neurological diseases associated with dysfunction of a target protein in a subject in need of treatment. The method optionally comprises administering to the subject a therapeutically effective amount of a composition comprising AAV particles comprising a nucleic acid sequence encoding the siRNA molecules of the present disclosure. As a non-limiting example, the siRNA molecules can silence target gene expression, inhibit target protein production, and reduce one or more symptoms of neurological disease in the subject such that the subject is therapeutically treated.

[0648] In some embodiments, the composition comprising the AAV particles of the present disclosure comprising a nucleic acid sequence encoding siRNA molecules comprise an AAV capsid that allows for transmission across the blood brain barrier after intravenous administration.

[0649] In some embodiments, the composition comprising the AAV particles comprising a nucleic acid sequence encoding the siRNA molecules of the present disclosure is administered to the central nervous system of the subject. In other embodiments, the composition comprising the AAV particles comprising a nucleic acid sequence encoding the siRNA molecules of the present disclosure is administered to a tissue of a subject (e.g., brain of the subject).

[0650] In one embodiment, the composition comprising the AAV particles comprising a nucleic acid sequence encoding the siRNA molecules of the present disclosure is administered to the central nervous system of the subject via systemic administration. In one embodiment, the systemic administration is intravenous injection.

[0651] In one embodiment, the composition comprising the AAV particles comprising a nucleic acid sequence encoding the siRNA molecules of the present disclosure is administered to the central nervous system of the subject via intraparenchymal injection. Non-limiting examples of intraparenchymal injections include intrathalamic, intrastriatal, intrahippocampal or targeting the entorhinal cortex.

[0652] In one embodiment, the composition comprising the AAV particles comprising a nucleic acid sequence encoding the siRNA molecules of the present disclosure is administered to the central nervous system of the subject via intraparenchymal injection and intrathecal injection.

[0653] In one embodiment, the AAV particles comprising a nucleic acid sequence encoding the siRNA molecules of the present disclosure may be delivered into specific types of targeted cells, including, but not limited to, hippocampal, cortical, motor or entorhinal neurons; glial cells including oligodendrocytes, astrocytes and microglia; and/or other cells surrounding neurons such as T cells.

[0654] In one embodiment, the AAV particles comprising a nucleic acid sequence encoding the siRNA molecules of the present disclosure may be delivered to neurons in the striatum and/or cortex.

[0655] In some embodiments, the AAV particles comprising a nucleic acid sequence encoding the siRNA molecules of the present disclosure may be used as a therapy for neurological disease.

[0656] In some embodiments, the AAV particles comprising a nucleic acid sequence encoding the siRNA molecules of the present disclosure may be used as a therapy for tauopathies.

[0657] In some embodiments, the AAV particles comprising a nucleic acid sequence encoding the siRNA molecules of the present disclosure may be used as a therapy for Alzheimer's Disease.

[0658] In some embodiments, the AAV particles comprising a nucleic acid sequence encoding the siRNA molecules of the present disclosure may be used as a therapy for Amyotrophic Lateral Sclerosis.

[0659] In some embodiments, the AAV particles comprising a nucleic acid sequence encoding the siRNA molecules of the present disclosure may be used as a therapy for Huntington's Disease.

[0660] In some embodiments, the AAV particles comprising a nucleic acid sequence encoding the siRNA molecules of the present disclosure may be used as a therapy for Parkinson's Disease.

[0661] In some embodiments, the AAV particles comprising a nucleic acid sequence encoding the siRNA molecules of the present disclosure may be used as a therapy for Friedreich's Ataxia.

[0662] In some embodiments, the AAV particles comprising a nucleic acid sequence encoding the siRNA molecules of the present disclosure may be used to suppress a target protein in astrocytes in order to treat neurological disease. Target protein in astrocytes may be suppressed by 5%, 10%, 15%, 20%, 25%, 30%, 35%, 40%, 45%, 50%, 55%, 60%, 65%, 70%, 75%, 80%, 85%, 90% 95%, or more than 95%, 5-15%, 5-20%, 5-25%, 5-30%, 5-35%, 5-40%, 5-45%, 5-50%, 5-55%, 5-60%, 5-65%, 5-70%, 5-75%, 5-80%, 5-85%, 5-90%, 5-95%, 10-20%, 10-25%, 10-30%, 10-35%, 10-40%, 10-45%, 10-50%, 10-55%, 10-60%, 10-65%, 10-70%, 10-75%, 10-80%, 10-85%, 10-90%, 10-95%, 15-25%, 15-30%, 15-35%, 15-40%, 15-45%, 15-50%, 15-55%, 15-60%, 15-65%, 15-70%, 15-75%, 15-80%, 15-85%, 15-90%, 15-95%, 20-30%, 20-35%, 20-40%, 20-45%, 20-50%, 20-55%, 20-60%, 20-65%, 20-70%, 20-75%, 20-80%, 20-85%, 20-90%, 20-95%, 25-35%, 25-40%, 25-45%, 25-50%, 25-55%, 25-60%, 25-65%, 25-70%, 25-75%, 25-80%, 25-85%, 25-90%, 25-95%, 30-40%, 30-45%, 30-50%, 30-55%, 30-60%, 30-65%, 30-70%, 30-75%, 30-80%, 30-85%, 30-90%, 30-95%, 35-45%, 35-50%, 35-55%, 35-60%, 35-65%, 35-70%, 35-75%, 35-80%, 35-85%, 35-90%, 35-95%, 40-50%, 40-55%, 40-60%, 40-65%, 40-70%, 40-75%, 40-80%, 40-85%, 40-90%, 40-95%, 45-55%, 45-60%, 45-65%, 45-70%, 45-75%, 45-80%, 45-85%, 45-90%, 45-95%, 50-60%, 50-65%, 50-70%, 50-75%, 50-80%, 50-85%, 50-90%, 50-95%, 55-65%, 55-70%, 55-75%, 55-80%, 55-85%, 55-90%, 55-95%, 60-70%, 60-75%, 60-80%, 60-85%, 60-90%, 60-95%, 65-75%, 65-80%, 65-85%, 65-90%, 65-95%, 70-80%, 70-85%, 70-90%, 70-95%, 75-85%, 75-90%, 75-95%, 80-90%, 80-95%, or 90-95%. Target protein in astrocytes may be reduced may be 5%, 10%, 15%, 20%, 25%, 30%, 35%, 40%, 45%, 50%, 55%, 60%, 65%, 70%, 75%, 80%, 85%, 90%, 95%, or more than 95%, 5-15%, 5-20%, 5-25%, 5-30%, 5-35%, 5-40%, 5-45%, 5-50%, 5-55%, 5-60%, 5-65%, 5-70%, 5-75%, 5-80%, 5-85%, 5-90%, 5-95%, 10-20%, 10-25%, 10-30%, 10-35%, 10-40%, 10-45%, 10-50%, 10-55%, 10-60%, 10-65%, 10-70%, 10-75%, 10-80%, 10-85%, 10-90%, 10-95%, 15-25%, 15-30%, 15-35%, 15-40%, 15-45%, 15-50%, 15-55%, 15-60%, 15-65%, 15-70%, 15-75%, 15-80%, 15-85%, 15-90%, 15-95%, 20-30%, 20-35%, 20-40%, 20-45%, 20-50%, 20-55%, 20-60%, 20-65%, 20-70%, 20-75%, 20-80%, 20-85%, 20-90%, 20-95%, 25-35%, 25-40%, 25-45%, 25-50%, 25-55%, 25-60%, 25-65%, 25-70%, 25-75%, 25-80%, 25-85%, 25-90%, 25-95%, 30-40%, 30-45%, 30-50%, 30-55%, 30-60%, 30-65%, 30-70%, 30-75%, 30-80%, 30-85%, 30-90%, 30-95%, 35-45%, 35-50%, 35-55%, 35-60%, 35-65%, 35-70%, 35-75%, 35-80%, 35-85%, 35-90%, 35-95%, 40-50%, 40-55%, 40-60%, 40-65%, 40-70%, 40-75%, 40-80%, 40-85%, 40-90%, 40-95%, 45-55%, 45-60%, 45-65%, 45-70%, 45-75%, 45-80%, 45-85%, 45-90%, 45-95%, 50-60%, 50-65%, 50-70%, 50-75%, 50-80%, 50-85%, 50-90%, 50-95%, 55-65%, 55-70%, 55-75%, 55-80%, 55-85%, 55-90%, 55-95%, 60-70/0, 60-75%, 60-80%, 60-85%, 60-90%, 60-95%, 65-75%, 65-80%, 65-85%, 65-90%, 65-95%, 70-80%, 70-85%, 70-90%, 70-95%, 75-85%, 75-90%, 75-95%, 80-90%, 80-95%, or 90-95%.

[0663] In some embodiments, the AAV particles comprising a nucleic acid sequence encoding the siRNA molecules of the present disclosure may be used to suppress a target protein in microglia. The suppression of the target protein in microglia may be, independently, suppressed by 5%, 10%, 15%, 20%, 25%, 30%, 35%, 40%, 45%, 50%, 55%, 60%, 65%, 70%, 75%, 80%, 85%, 90%, 95%, or more than 95%, 5-15%, 5-20%, 5-25%, 5-30%, 5-35%, 5-40%, 5-45%, 5-50%, 5-55%, 5-60%, 5-65%, 5-70%, 5-75%, 5-80%, 5-85%, 5-90%, 5-95%, 10-20%, 10-25%, 10-30%, 10-35%, 10-40%, 10-45%, 10-50%, 10-55%, 10-60%, 10-65%, 10-70%, 10-75%, 10-80%, 10-85%, 10-90%, 10-95%, 15-25%, 15-30%, 15-35%, 15-40%, 15-45%, 15-50%, 15-55%, 15-60%, 15-65%, 15-70%, 15-75%, 15-80%, 15-85%, 15-90%, 15-95%, 20-30%, 20-35%, 20-40%, 20-45%, 20-50%, 20-55%, 20-60%, 20-65%, 20-70%, 20-75%, 20-80%, 20-85%, 20-90%, 20-95%, 25-35%, 25-40%, 25-45%, 25-50%, 25-55%, 25-60%, 25-65%, 25-70%, 25-75%, 25-80%, 25-85%, 25-90% 25-95%, 30-40%, 30-45%, 30-50%, 30-55%, 30-60%, 30-65%, 30-70%, 30-75%, 30-80%, 30-85%, 30-90%, 30-95%, 35-45%, 35-50%, 35-55%, 35-60%, 35-65%, 35-70%, 35-75%, 35-80%, 35-85%, 35-90%, 35-95%, 40-50%, 40-55%, 40-60%, 40-65%, 40-70%, 40-75%, 40-80%, 40-85%, 40-90%, 40-95%, 45-55%, 45-60%, 45-65%, 45-70%, 45-75%, 45-80%, 45-85%, 45-90%, 45-95%, 50-60%, 50-65%, 50-70%, 50-75%, 50-80%, 50-85%, 50-90%, 50-95%, 55-65%, 55-70%, 55-75%, 55-80%, 55-85%, 55-90%, 55-95%, 60-70%, 60-75%, 60-80%, 60-85%, 60-90%, 60-95%, 65-75%, 65-80%, 65-85%, 65-90%, 65-95%, 70-80%, 70-85%, 70-90%, 70-95%, 75-85%, 75-90%, 75-95%, 80-90%, 80-95%, or 90-95%. The reduction may be 5%, 10%, 15%, 20%, 25%, 30%, 35%, 40%, 45%, 50%, 55%, 60%, 65%, 70%, 75%, 80%, 85%, 90%, 95%, or more than 95%, 5-15%, 5-20%, 5-25%, 5-30%, 5-35%, 5-40%, 5-45%, 5-50%, 5-55%, 5-60%, 5-65%, 5-70%, 5-75%, 5-80%, 5-85%, 5-90%, 5-95%, 10-20%, 10-25%, 10-30%, 10-35%, 10-40%, 10-45%, 10-50%, 10-55%, 10-60%, 10-65%10-70%, 10-75%, 10-80%, 10-85%, 10-90%, 10-95%, 15-25%, 15-30%, 15-35%, 15-40%, 15-45°/o, 15-50%, 15-55%, 15-60%, 15-65%, 15-70%, 15-75%, 15-80%, 15-85%, 15-90%, 15-95%, 20-30%, 20-35%, 20-40%, 20-45%, 20-50%, 20-55%, 20-60%, 20-65%, 20-70%, 20-75%, 20-80%, 20-85%, 20-90%, 20-95%, 25-35%, 25-40%, 25-45%, 25-50%, 25-55%, 25-60%, 25-65%, 25-70%, 25-75%, 25-80%, 25-85%, 25-90%, 25-95%, 30-40%, 30-45%, 30-50%, 30-55%, 30-60%, 30-65%, 30-70%, 30-75%, 30-80%, 30-85%, 30-90%, 30-95%, 35-45%, 35-50%, 35-55%, 35-60%, 35-65%, 35-70%, 35-75%, 35-80%, 35-85%, 35-90%, 35-95%, 40-50%, 40-55%, 40-60%, 40-65%, 40-70%, 40-75%, 40-80%, 40-85%, 40-90%, 40-95%, 45-55%, 45-60%, 45-65%, 45-70%, 45-75%, 45-80%, 45-85%, 45-90%, 45-95%, 50-60%, 50-65%, 50-70%, 50-75%, 50-80%, 50-85%, 50-90%, 50-95%, 55-65%, 55-70%, 55-75%, 55-80%, 55-85%, 55-90%, 55-95%, 60-70%, 60-75%, 60-80%, 60-85%, 60-90%, 60-95%, 65-75%, 65-80%, 65-85%, 65-90%, 65-95%, 70-80%, 70-85%, 70-90%, 70-95%, 75-85%, 75-90%, 75-95%, 80-90%, 80-95%, or 90-95%.

[0664] In some embodiments, the AAV particles comprising a nucleic acid sequence encoding the siRNA molecules of the present disclosure may be used to suppress a target protein in cortical neurons. The suppression of a target protein in cortical neurons may be, independently, suppressed by 5%, 10%, 15%, 20%, 25%, 30%, 35%, 40%, 45%, 50%, 55%, 60%, 65%, 70%, 75%, 80%, 85%, 90%, 95%, or more than 95%, 5-15%, 5-20%, 5-25%, 5-30%, 5-35%, 5-40%, 5-45%, 5-50%, 5-55%, 5-60%, 5-65%, 5-70%, 5-75%, 5-80%, 5-85%, 5-90%, 5-95%, 10-20%, 10-25%, 10-30%, 10-35%, 10-40%, 10-45%, 10-50%, 10-55%, 10-60%, 10-65%, 10-70%, 10-75%, 10-80%, 10-85%, 10-90%, 10-95%, 15-25%, 15-30%, 15-35%, 15-40%, 15-45%, 15-50%, 15-55%, 15-60%, 15-65%, 15-70%, 15-75%, 15-80%, 15-85%, 15-90%, 15-95%, 20-30%, 20-35%, 20-40%, 20-45%, 20-50%, 20-55%, 20-60%, 20-65%, 20-70%, 20-75%, 20-80%, 20-85%, 20-90%, 20-95%, 25-35%, 25-40%, 25-45%, 25-50%, 25-55%, 25-60%, 25-65%, 25-70%, 25-75%, 25-80%, 25-85%, 25-90%, 25-95%, 30-40%, 30-45%, 30-50%, 30-55%, 30-60%, 30-65%, 30-70%, 30-75%, 30-80%, 30-85%, 30-90%, 30-95%, 35-45%, 35-50%, 35-55%, 35-60%, 35-65%, 35-70%, 35-75%, 35-80%, 35-85%, 35-90%, 35-95%, 40-50%, 40-55%, 40-60%, 40-65%, 40-70%, 40-75%, 40-80%, 40-85%, 40-90%, 40-95%, 45-55%, 45-60%, 45-65%, 45-70%, 45-75%, 45-80%, 45-85%, 45-90%, 45-95%, 50-60%, 50-65%, 50-70%, 50-75%, 50-80%, 50-85%, 50-90%, 50-95%, 55-65%, 55-70%, 55-75%, 55-80%, 55-85%, 55-90%, 55-95%, 60-70%, 60-75%, 60-80%, 60-85%, 60-90%, 60-95%, 65-75%, 65-80%, 65-85%, 65-90%, 65-95%, 70-80%, 70-85%, 70-90%, 70-95%, 75-85%, 75-90%, 75-95%, 80-90%, 80-95%, or 90-95%. The reduction may be 5%, 10%, 15%, 20%, 25%, 30%, 35%, 40%, 45%, 50%, 55%, 60%, 65%, 70%, 75%, 80%, 85%, 90%, 95%, or more than 95%, 5-15%, 5-20%, 5-25%, 5-30%, 5-35%, 5-40%, 5-45%, 5-50%, 5-55%, 5-60%, 5-65/%, 5-70%, 5-75%, 5-80%, 5-85%, 5-90%, 5-95%, 10-20%, 10-25%, 10-30%, 10-35%, 10-40%, 1045%, 10-50%, 10-55%, 10-60%, 10-65%, 10-70%, 10-75%, 10-80%, 10-85%, 10-90%, 10-95%, 15-25%, 15-30%, 15-35%, 15-40%, 15-45%, 15-50%, 15-55%, 15-60%, 15-65%, 15-70%, 15-75%, 15-80%, 15-85%, 15-90%, 15-95%, 20-30%, 20-35%, 20-40%, 20-45%, 20-50%, 20-55%, 20-60%, 20-65%, 20-70%, 20-75%, 20-80%, 20-85%, 20-90%, 20-95%, 25-35%, 25-40%, 25-45%, 25-50%, 25-55%, 25-60%, 25-65%, 25-70%, 25-75%, 25-80%, 25-85%, 25-90%, 25-95%, 3040%, 3045%, 30-50%, 30-55%, 30-60%, 30-65%, 30-70%, 30-75%, 30-80%, 30-85%, 30-90%, 30-95%, 3545%, 35-50%, 35-55%, 35-60%, 35-65%, 35-70%, 35-75%, 35-80%, 35-85%, 35-90%, 35-95%, 40-50%, 40-55%, 40-60%, 40-65%, 40-70%, 40-75%, 40-80%, 40-85%, 40-90%, 40-95%, 45-55%, 45-60%, 45-65%, 45-70%, 45-75%, 45-80%, 45-85%, 45-90%, 45-95%, 50-60%, 50-65%, 50-70%, 50-75%, 50-80%, 50-85%, 50-90%, 50-95%, 55-65%, 55-70%, 55-75%, 55-80%, 55-85%, 55-90%, 55-95%, 60-70%, 60-75%, 60-80%, 60-85%, 60-90%, 60-95%, 65-75%, 65-80%, 65-85%, 65-90%, 65-95%, 70-80%, 70-85%, 70-90%, 70-95%, 75-85%, 75-90%, 75-95%, 80-90%, 80-95%, or 90-95%.

[0665] In some embodiments, the AAV particles comprising a nucleic acid sequence encoding the siRNA molecules of the present disclosure may be used to suppress a target protein in hippocampal neurons. The suppression of a target protein in the hippocampal neurons may be, independently, suppressed by 5%, 10%, 15%, 20%, 25%, 30%, 35%, 40%, 45%, 50%, 55%, 60%, 65%, 70%, 75%, 80%, 85%, 90%, 95%, or more than 95%, 5-15%, 5-20%, 5-25%, 5-30%, 5-35%, 5-40%, 545%, 5-50%, 5-55%, 5-60%, 5-65%, 5-70%, 5-75%, 5-80%, 5-85%, 5-90%, 5-95%, 10-20%, 10-25%, 10-30%, 10-35%, 1040%, 1045%, 10-50%, 10-55%, 10-60%, 10-65%, 10-70%, 10-75%, 10-80%, 10-85%, 10-90%, 10-95%, 15-25%, 15-30%, 15-35%, 1540%, 1545%, 15-50%, 15-55%, 15-60%, 15-65%, 15-70%, 15-75%, 15-80%, 15-85%, 15-90%, 15-95%, 20-30%, 20-35%, 2040%, 20-45%, 20-50%, 20-55%, 20-60%, 20-65%, 20-70%, 20-75%, 20-80%, 20-85%, 20-90%, 20-95%, 25-35%, 25-40%, 2545%, 25-50%, 25-55%, 25-60%, 25-65%, 25-70%, 25-75%, 25-80%, 25-85%, 25-90%, 25-95%, 3040%, 3045%, 30-50%, 30-55%, 30-60%, 30-65%, 30-70%, 30-75%, 30-80%, 30-85%, 30-90%, 30-95%, 3545%, 35-50%, 35-55%, 35-60%, 35-65%, 35-70%, 35-75%, 35-80%, 35-85%, 35-90%, 35-95%, 40-50%, 40-55%, 40-60%, 40-65%, 40-70%, 40-75%, 40-80%, 40-85%, 40-90%, 40-95%, 45-55%, 45-60%, 45-65%, 45-70%, 45-75%, 45-80%, 45-85%, 45-90%, 45-95%, 50-60%, 50-65%, 50-70%, 50-75%, 50-80%, 50-85%, 50-90%, 50-95%, 55-65%, 55-70%, 55-75%, 55-80%, 55-85%, 55-90%, 55-95%, 60-70%, 60-75%, 60-80%, 60-85%, 60-90%, 60-95%, 65-75%, 65-80%, 65-85%, 65-90%, 65-95%, 70-80%, 70-85%, 70-90%, 70-95%, 75-85%, 75-90%, 75-95%, 80-90%, 80-95%, or 90-95%. The reduction may be 5%, 10%, 15%, 20%, 25%, 30%, 35%, 40%, 45%, 50%, 55%, 60%, 65%, 70%, 75%, 80%, 85%, 90%, 95%, or more than 95%, 5-15%, 5-20%, 5-25%, 5-30%, 5-35%, 5-40%, 5-45%, 5-50%, 5-55%, 5-60%, 5-65%, 5-70%, 5-75%, 5-80%, 5-85%, 5-90%, 5-95%, 10-20%, 10-25%, 10-30%, 10-35%, 10-40%, 10-45%, 10-50%, 10-55%, 10-60%, 10-65%, 10-70%, 10-75%, 10-80%, 10-85%, 10-90%, 10-95%, 15-25%, 15-30%, 15-35%, 15-40%, 15-45%, 15-50%, 15-55%, 15-60%, 15-65%, 15-70%, 15-75%, 15-80%, 15-85%, 15-90%, 15-95%, 20-30%, 20-35%, 20-40%, 20-45%, 20-50%, 20-55%, 20-60%, 20-65%, 20-70%, 20-75%, 20-80%, 20-85%, 20-90%, 20-95%, 25-35/o, 25-40%, 25-45%, 25-50%, 25-55%, 25-60%, 25-65%, 25-70%, 25-75%, 25-80%, 25-85%, 25-90%, 25-95%, 30-40%, 30-45%, 30-50%, 30-55%, 30-60%, 30-65%, 30-70%, 30-75%, 30-80%, 30-85%, 30-90%, 30-95%, 35-45%, 35-50%, 35-55%, 35-60%, 35-65%, 35-70%, 35-75%, 35-80%, 35-85%, 35-90%, 35-95%, 40-50%, 40-55%, 40-60%, 40-65%, 40-70%, 40-75%, 40-80%, 40-85%, 40-90%, 40-95%, 45-55%, 45-60%, 45-65%, 45-70%, 45-75%, 45-80%, 45-85%, 45-90%, 45-95%, 50-60%, 50-65%, 50-70%, 50-75%, 50-80%, 50-85%, 50-90%, 50-95%, 55-65%, 55-70%, 55-75%, 55-80%, 55-85%, 55-90%, 55-95%, 60-70%, 60-75%, 60-80%, 60-85%, 60-90%, 60-95%, 65-75%, 65-80%, 65-85%, 65-90%, 65-95%, 70-80%, 70-85%, 70-90%, 70-95%, 75-85%, 75-90%, 75-95%, 80-90%, 80-95%, or 90-95%.

[0666] In some embodiments, the AAV particles comprising a nucleic acid sequence encoding the siRNA molecules of the present disclosure may be used to suppress a target protein in DRG and/or sympathetic neurons. The suppression of a target protein in the DRG and/or sympathetic neurons may be, independently, suppressed by 5%, 10%, 15%, 20%, 25%, 30%, 35%, 40%, 45%, 50%, 55%, 60%, 65%, 70%, 75%, 80%, 85%, 90%, 95%, or more than 95%, 5-15%, 5-20%, 5-25%, 5-30%, 5-35%, 5-40%, 5-45%, 5-50%, 5-55%, 5-60%, 5-65%, 5-70%, 5-75%, 5-80%, 5-85%, 5-90%, 5-95%, 10-20%, 10-25%, 10-30%, 10-35%, 10-40%, 10-45%, 10-50%, 10-55%, 10-60%, 10-65%, 10-70%, 10-75%, 10-80%, 10-85%, 10-90%, 10-95%, 15-25%, 15-30%, 15-35%, 15-40%, 15-45%, 15-50%, 15-55%, 15-60%, 15-65%, 15-70%, 15-75%, 15-80%, 15-85%, 15-90%, 15-95%, 20-30%, 20-35%, 20-40%, 20-45%, 20-50%, 20-55%, 20-60%, 20-65%, 20-70%, 20-75%, 20-80%, 20-85%, 20-90%, 20-95%, 25-35%, 25-40%, 25-45%, 25-50%, 25-55%, 25-60%, 25-65%, 25-70%, 25-75%, 25-80%, 25-85%, 25-90%, 25-95%, 30-40%, 30-45%, 30-50%, 30-55%, 30-60%, 30-65%, 30-70%, 30-75%, 30-80%, 30-85%, 30-90%, 30-95%, 3545%, 35-50%, 35-55%, 35-60%, 35-65%, 35-70%, 35-75%, 35-80%, 35-85%, 35-90%, 35-95%, 40-50%, 40-55%, 40-60%, 40-65%, 40-70%, 40-75%, 40-80%, 40-85%, 40-90%, 40-95%, 45-55%, 45-60%, 45-65%, 45-70%, 45-75%, 45-80%, 45-85%, 45-90%, 45-95%, 50-60%, 50-65%, 50-70%, 50-75%, 50-80%, 50-85%, 50-90%, 50-95%, 55-65%, 55-70%, 55-75%, 55-80%, 55-85%, 55-90%, 55-95%, 60-70%, 60-75%, 60-80%, 60-85%, 60-90%, 60-95%, 65-75%, 65-80%, 65-85%, 65-90%, 65-95%, 70-80%, 70-85%, 70-90%, 70-95%, 75-85%, 75-90%, 75-95%, 80-90%, 80-95%, or 90-95%. The reduction may be 5%, 10%, 15%, 20%, 25%, 30%, 35%, 40%, 45%, 50%, 55%, 60%, 65%, 70%, 75%, 80%, 85%, 90%, 95%, or more than 95%, 5-15%, 5-20%, 5-25%, 5-30%, 5-35%, 5-40%, 5-45%, 5-50%, 5-55%, 5-60%, 5-65%, 5-70%, 5-75%, 5-80%, 5-85%, 5-90%, 5-95%, 10-20%, 10-25%, 10-30%, 10-35%, 10-40%, 10-45%, 10-50%, 10-55%, 10-60%, 10-65%, 10-70%, 10-75%, 10-80%, 10-85%, 10-90%, 10-95%, 15-25%, 15-30%, 15-35%, 15-40%, 15-45%, 15-50%, 15-55%, 15-60%, 15-65%, 15-70%, 15-75%, 15-80%, 15-85%, 15-90%, 15-95%, 20-30%, 20-35%, 20-40%, 20-45%, 20-50%, 20-55%, 20-60%, 20-65%, 20-70%, 20-75%, 20-80%, 20-85%, 20-90%, 20-95%, 25-35%, 25-40%, 25-45%, 25-50%, 25-55%, 25-60%, 25-65%, 25-70%, 25-75%, 25-80%, 25-85%, 25-90%, 25-95%, 30-40%, 30-45%, 30-50%, 30-55%, 30-60%, 30-65%, 30-70%, 30-75%, 30-80%, 30-85%, 30-90%, 30-95%, 35-45%, 35-50%, 35-55%, 35-60%, 35-65%, 35-70%, 35-75%, 35-80%, 35-85%, 35-90%, 35-95%, 40-50%, 40-55%, 40-60%, 40-65%, 40-70%, 40-75%, 40-80%, 40-85%, 40-90%, 40-95%, 45-55%, 45-60%, 45-65%, 45-70%, 45-75%, 45-80%, 45-85%, 45-90%, 45-95%, 50-60%, 50-65%, 50-70%, 50-75%, 50-80%, 50-85%, 50-90%, 50-95%, 55-65%, 55-70%, 55-75%, 55-80%, 55-85%, 55-90%, 55-95%, 60-70%, 60-75%, 60-80%, 60-85%, 60-90%, 60-95%, 65-75%, 65-80%, 65-85%, 65-90%, 65-95%, 70-80%, 70-85%, 70-90%, 70-95%, 75-85%, 75-90%, 75-95%, 80-90%, 80-95%, or 90-95%.

[0667] In some embodiments, the AAV particles comprising a nucleic acid sequence encoding the siRNA molecules of the present disclosure may be used to suppress a target protein in sensory neurons in order to treat neurological disease. Target protein in sensory neurons may be suppressed by 5%, 10%, 15%, 20%, 25%, 30%, 35%, 40%, 45%, 50%, 55%, 60%, 65%, 70%, 75%, 80%, 85%, 90%, 95%, or more than 95%, 5-15%, 5-20%, 5-25%, 5-30%, 5-35%, 5-40%, 5-45%, 5-50%, 5-55%, 5-60%, 5-65%, 5-70%, 5-75%, 5-80%, 5-85%, 5-90%, 5-95%, 10-20%, 10-25%, 10-30%, 10-35%, 10-40%, 10-45%, 10-50%, 10-55%, 10-60%, 10-65%, 10-70%, 10-75%, 10-80%, 10-85%, 10-90%, 10-95%, 15-25%, 15-30%, 15-35%, 15-40%, 15-45%, 15-50%, 15-55%, 15-60%, 15-65%, 15-70/0, 15-75%, 15-80%, 15-85%, 15-90%, 15-95%, 20-30%, 20-35%, 20-40%, 20-45%, 20-50%, 20-55%, 20-60%, 20-65%, 20-70%, 20-75%, 20-80%, 20-85%, 20-90%, 20-95%, 25-35%, 25-40%, 25-45%, 25-50%, 25-55%, 25-60%, 25-65%, 25-70%, 25-75%, 25-80%, 25-85%, 25-90%, 25-95%, 30-40%, 30-45%, 30-50%, 30-55%, 30-60%, 30-65%, 30-70%, 30-75%, 30-80%, 30-85%, 30-90%, 30-95%, 35-45%, 35-50%, 35-55%, 35-60%, 35-65%, 35-70%, 35-75%, 35-80%, 35-85%, 35-90%, 35-95%, 40-50%, 40-55%, 40-60%, 40-65%, 40-70%, 40-75%, 40-80%, 40-85%, 40-90%, 40-95%, 45-55%, 45-60%, 45-65%, 45-70%, 45-75%, 45-80%, 45-85%, 45-90%, 45-95%, 50-60%, 50-65%, 50-70%, 50-75%, 50-80%, 50-85%, 50-90%, 50-95%, 55-65%, 55-70%, 55-75%, 55-80%, 55-85%, 55-90%, 55-95%, 60-70%, 60-75%, 60-80%, 60-85%, 60-90%, 60-95%, 65-75%, 65-80%, 65-85%, 65-90%, 65-95%, 70-80%, 70-85%, 70-90%, 70-95%, 75-85%, 75-90%, 75-95%, 80-90%, 80-95%, or 90-95%. Target protein in the sensory neurons may be reduced may be 5%, 10%, 15%, 20%, 25%, 30%, 35%, 40%, 45%, 50%, 55%, 60%, 65%, 70%, 75%, 80%, 85%, 90%, 95%, or more than 95%, 5-15%, 5-20%, 5-25%, 5-30%, 5-35%, 5-40%, 545%, 5-50%, 5-55%, 5-60%, 5-65%, 5-70%, 5-75%, 5-80%, 5-85%, 5-90%, 5-95%, 10-20%, 10-25%, 10-30%, 10-35%, 10-40%, 10-45%, 10-50%, 10-55%, 10-60%, 10-65%, 10-70%, 10-75%, 10-80%, 10-85%, 10-90%, 10-95%, 15-25%, 15-30%, 15-35%, 15-40%, 15-45%, 15-50%, 15-55%, 15-60%, 15-65%, 15-70%, 15-75%, 15-80%, 15-85%, 15-90%, 15-95%, 20-30%, 20-35%, 20-40%, 20-45%, 20-50%, 20-55%, 20-60%, 20-65%, 20-70%, 20-75%, 20-80%, 20-85%, 20-90%, 20-95%, 25-35%, 25-40%, 25-45%, 25-50%, 25-55%, 25-60%, 25-65%, 25-70%, 25-75%, 25-80%, 25-85%, 25-90%, 25-95%, 30-40%, 30-45%, 30-50%, 30-55%, 30-60%, 30-65%, 30-70%, 30-75%, 30-80%, 30-85%, 30-90%, 30-95%, 35-45%, 35-50%, 35-55%, 35-60%, 35-65%, 35-70%, 35-75%, 35-80%, 35-85%, 35-90%, 35-95%, 40-50%, 40-55%, 40-60%, 40-65%, 40-70%, 40-75%, 40-80%, 40-85%, 40-90%, 40-95%, 45-55%, 45-60% 45-65%, 45-70%, 45-75%, 45-80%, 45-85%, 45-90%, 45-95%, 50-60%, 50-65%, 50-70%, 50-75%, 50-80%, 50-85%, 50-90%, 50-95%, 55-65%, 55-70%, 55-75%, 55-80%, 55-85%, 55-90%, 55-95%, 60-70%, 60-75%, 60-80%, 60-85%, 60-90%, 60-95%, 65-75%, 65-80%, 65-85%, 65-90%, 65-95%, 70-80%, 70-85%, 70-90%, 70-95%, 75-85%, 75-90%, 75-95%, 80-90%, 80-95%, or 90-95%.

[0668] In some embodiments, the AAV particles comprising a nucleic acid sequence encoding the siRNA molecules of the present disclosure may be used to suppress a target protein and reduce symptoms of neurological disease in a subject. The suppression of target protein and/or the reduction of symptoms of neurological disease may be, independently, reduced or suppressed by 5%, 10%, 15%, 20%, 25%, 30%, 35%, 40%, 45%, 50%, 55%, 60%, 65%, 70%, 75%, 80%, 85%, 90%, 95%, or more than 95%, 5-15%, 5-20%, 5-25%, 5-30%, 5-35%, 5-40%, 5-45%, 5-50%, 5-55%, 5-60%, 5-65%, 5-70%, 5-75%, 5-80%, 5-85%, 5-90%, 5-95%, 10-20%, 10-25%, 10-30%, 10-35%, 1040%, 1045%, 10-50%, 10-55%, 10-60%, 10-65%, 10-70%, 10-75%, 10-80%, 10-85%, 10-90%, 10-95%, 15-25%, 15-30%, 15-35%, 1540%, 1545%, 15-50%, 15-55%, 15-60%, 15-65%, 15-70%, 15-75%, 15-80%, 15-85%, 15-90%, 15-95%, 20-30%, 20-35%, 20-40%, 20-45%, 20-50%, 20-55%, 20-60%, 20-65%, 20-70%, 20-75%, 20-80%, 20-85%, 20-90%, 20-95%, 25-35%, 25-40%, 25-45%, 25-50%, 25-55%, 25-60%, 25-65%, 25-70%, 25-75%, 25-80%, 25-85%, 25-90%, 25-95%, 30-40%, 30-45%, 30-50%, 30-55%, 30-60%, 30-65%, 30-70%, 30-75%, 30-80%, 30-85%, 30-90%, 30-95%, 3545%, 35-50%, 35-55%, 35-60%, 35-65%, 35-70%, 35-75%, 35-80%, 35-85%, 35-90%, 35-95%, 40-50%, 40-55%, 40-60%, 40-65%, 40-70%, 40-75%, 40-80%, 40-85%, 40-90%, 40-95%, 45-55%, 45-60%, 45-65%, 45-70%, 45-75%, 45-80%, 45-85%, 45-90%, 45-95%, 50-60%, 50-65%, 50-70%, 50-75%, 50-80%, 50-85%, 50-90%, 50-95%, 55-65%, 55-70%, 55-75%, 55-80%, 55-85%, 55-90%, 55-95%, 60-70%, 60-75%, 60-80%, 60-85%, 60-90%, 60-95%, 65-75%, 65-80%, 65-85%, 65-90%, 65-95%, 70-80%, 70-85%, 70-90%, 70-95%, 75-85%, 75-90%, 75-95%, 80-90%, 80-95%, or 90-95%.

[0669] In one embodiment, the AAV particles comprising a nucleic acid sequence encoding the siRNA molecules of the present disclosure may be used to reduce the decline of functional capacity and activities of daily living as measured by a standard evaluation system such as, but not limited to, the total functional capacity (TFC) scale.

[0670] In some embodiments, the present composition is administered as a solo therapeutic or as combination therapeutic for the treatment of neurological disease.

[0671] The AAV particles encoding siRNA duplexes targeting the gene of interest may be used in combination with one or more other therapeutic agents. By “in combination with,” it is not intended to imply that the agents must be administered at the same time and/or formulated for delivery together, although these methods of delivery are within the scope of the present disclosure. Compositions can be administered concurrently with, prior to, or subsequent to, one or more other desired therapeutics or medical procedures. In general, each agent will be administered at a dose and/or on a time schedule determined for that agent.

[0672] Therapeutic agents that may be used in combination with the AAV particles encoding the nucleic acid sequence for the siRNA molecules of the present disclosure can be small molecule compounds which are antioxidants, anti-inflammatory agents, anti-apoptosis agents, calcium regulators, antiglutamatergic agents, structural protein inhibitors, compounds involved in muscle function, and compounds involved in metal ion regulation.

[0673] Compounds tested for treating neurological disease which may be used in combination with the AAV particles comprising a nucleic acid sequence encoding the siRNA molecules of the present disclosure include, but are not limited to, cholinesterase inhibitors (donepezil, rivastigmine, galantamine), NMDA receptor antagonists such as memantine, anti-psychotics, anti-depressants, anti-convulsants (e.g., sodium valproate and levetiracetam for myoclonus), secretase inhibitors, amyloid aggregation inhibitors, copper or zinc modulators, BACE inhibitors, inhibitors of tau aggregation, such as Methylene blue, phenothiazines, anthraquinones, n-phenylamines or rhodamines, microtubule stabilizers such as NAP, taxol or paclitaxel, kinase or phosphatase inhibitors such as those targeting GSK3p (lithium) or PP2A, immunization with Aβ peptides or tau phospho-epitopes, anti-tau or anti-amyloid antibodies, dopamine-depleting agents (e.g., tetrabenazine for chorea), benzodiazepines (e.g., clonazepam for myoclonus, chorea, dystonia, rigidity, and/or spasticity), amino acid precursors of dopamine (e.g., levodopa for rigidity), skeletal muscle relaxants (e.g., baclofen, tizanidine for rigidity and/or spasticity), inhibitors for acetylcholine release at the neuromuscular junction to cause muscle paralysis (e.g., botulinum toxin for bruxism and/or dystonia), atypical neuroleptics (e.g., olanzapine and quetiapine for psychosis and/or irritability, risperidone, sulpiride and haloperidol for psychosis, chorea and/or irritability, clozapine for treatment-resistant psychosis, aripiprazole for psychosis with prominent negative symptoms), selective serotonin reuptake inhibitors (SSRIs) (e.g., citalopram, fluoxetine, paroxetine, sertraline, mirtazapine, venlafaxine for depression, anxiety, obsessive compulsive behavior and/or irritability), hypnotics (e.g., xopiclone and/or zolpidem for altered sleep-wake cycle), anticonvulsants (e.g., sodium valproate and carbamazepine for mania or hypomania) and mood stabilizers (e.g., lithium for mania or hypomania).

[0674] Neurotrophic factors may be used in combination therapy with the AAV particles encoding the nucleic acid sequence for the siRNA molecules of the present disclosure for treating neurological disease. Generally, a neurotrophic factor is defined as a substance that promotes survival, growth, differentiation, proliferation and/or maturation of a neuron, or stimulates increased activity of a neuron. In some embodiments, the present methods further comprise delivery of one or more trophic factors into the subject in need of treatment. Trophic factors may include, but are not limited to, IGF-I, GDNF, BDNF, CTNF, VEGF, Colivelin, Xaliproden, Thyrotrophin-releasing hormone and ADNF, and variants thereof.

[0675] In one aspect, the AAV particle encoding the nucleic acid sequence for the at least one siRNA duplex targeting the gene of interest may be co-administered with AAV particles expressing neurotrophic factors such as AAV-IGF-I (See e.g., Vincent et al., Neuromolecular medicine, 2004, 6, 79-85; the content of which is incorporated herein by reference in its entirety) and AAV-GDNF (See e.g., Wang et al., J Neurosci., 2002, 22, 6920-6928; the contents of which are incorporated herein by reference in their entirety).

[0676] In some embodiments, the composition for treating neurological disease, as described herein, is administered to the subject in need intravenously, intramuscularly, subcutaneously, intraperitoneally, intraparenchymally, intrathecally and/or intraventricularly, allowing the siRNA molecules or vectors comprising the siRNA molecules to pass through one or both the blood-brain barrier and the blood spinal cord barrier. In some aspects, the method includes administering (e.g., intraparenchymal administration, intraventricular administration and/or intrathecally administration) directly to the central nervous system (CNS) of a subject (using, e.g., an infusion pump and/or a delivery scaffold) a therapeutically effective amount of a composition comprising AAV particles encoding the nucleic acid sequence for the siRNA molecules of the present disclosure. The vectors may be used to silence or suppress target gene expression, and/or reducing one or more symptoms of neurological disease in the subject such that the subject is therapeutically treated.

[0677] In one embodiment, administration of the AAV particles encoding a siRNA of the disclosure, to a subject may lower target protein levels in a subject. The target protein levels may be lowered by about 30%, 40%, 50%, 60%, 70%, 80%, 85%, 90%, 95% and 100%, or at least 20-30%, 20-40%, 20-50%, 20-60%, 20-70%, 20-80%, 20-90%, 20-95%, 20-100%, 30-40%, 30-50%, 30-60%, 30-70%, 30-80%, 30-90%, 30-95%, 30-100%, 40-50%, 40-60%, 40-70%, 40-80%, 40-90%, 40-95%, 40-100%, 50-60%, 50-70%, 50-80%, 50-90%, 50-95%, 50-100%, 60-70%, 60-80%, 60-90%, 60-95%, 60-100%, 70-80%, 70-90%, 70-95%, 70-100%, 80-90%, 80-95%, 80-100%, 90-95%, 90-100% or 95-100% in a subject such as, but not limited to, the CNS, a region of the CNS, or a specific cell of the CNS of a subject. As a non-limiting example, the AAV particles may lower the protein levels of a target protein by at least 50%. As a non-limiting example, the AAV particles may lower the proteins levels of a target protein by at least 40%.

[0678] In one embodiment, administration of the AAV particles encoding a siRNA of the disclosure, to a subject may lower the expression of a target protein in a subject. The expression of a target protein may be lowered by about 30%, 40%, 50%, 60%, 70%, 80%, 85%, 90%, 95% and 100%, or at least 20-30%, 20-40%, 20-50%, 20-60%, 20-70%, 20-80%, 20-90%, 20-95%, 20-100%, 30-40%, 30-50%, 30-60%, 30-70%, 30-80%, 30-90%, 30-95%, 30-100%, 40-50%, 40-60%, 40-70%, 40-80%, 40-90%, 40-95%, 40-100%, 50-60%, 50-70%, 50-80%, 50-90%, 50-95%, 50-100%, 60-70%, 60-80%, 60-90%, 60-95%, 60-100%, 70-80%, 70-90%, 70-95%, 70-100%, 80-90%, 80-95%, 80-100%, 90-95%, 90-100% or 95-100% in a subject such as, but not limited to, the CNS, a region of the CNS, or a specific cell of the CNS of a subject. As a non-limiting example, the AAV particles may lower the expression of a target protein by at least 50%. As a non-limiting example, the AAV particles may lower the expression of a target protein by at least 40%.

[0679] In one embodiment, intravenous administration of the AAV particles encoding a siRNA of the disclosure, to a subject may lower the expression of a target protein in the CNS of a subject. The expression of a target protein may be lowered by about 30%, 40%, 50%, 60%, 70%, 80%, 85%, 90%, 95% and 100%, or at least 20-30%, 20-40%, 20-50%, 20-60%, 20-70%, 20-80%, 20-90%, 20-95%, 20-100%, 30-40%, 30-50%, 30-60%, 30-70%, 30-80%, 30-90%, 30-95%, 30-100%, 40-50%, 40-60%, 40-70%, 40-80%, 40-90%, 40-95%, 40-100%, 50-60%, 50-70%, 50-80%, 50-90%, 50-95%, 50-100%, 60-70%, 60-80%, 60-90%, 60-95%, 60-100%, 70-80%, 70-90%, 70-95%, 70-100%, 80-90%, 80-95%, 80-100%, 90-95%, 90-100% or 95-100% in a subject such as, but not limited to, the CNS, a region of the CNS, or a specific cell of the CNS of a subject. As a non-limiting example, the AAV particles may lower the expression of a target protein by at least 50%. As a non-limiting example, the AAV particles may lower the expression of a target protein by at least 40%.

[0680] In one embodiment, administration of the AAV particles to a subject will reduce the expression of a target protein in a subject and the reduction of expression of the target protein will reduce the effects and/or symptoms of neurological disease in a subject.

[0681] In one embodiment, the AAV particles may be used to decrease target protein in a subject. The decrease may independently be 5%, 10%, 15%, 20%, 25%, 30%, 35%, 40%, 45%, 50%, 55%, 60%, 65%, 70%, 75%, 80%, 85%, 90%, 95%, or more than 95%, 5-15%, 5-20%, 5-25%, 5-30%, 5-35%, 5-40%, 545%, 5-50%, 5-55%, 5-60%, 5-65%, 5-70%, 5-75%, 5-80%, 5-85%, 5-90%, 5-95%, 10-20%, 10-25%, 10-30%, 10-35%, 10-40%, 1045%, 10-50%, 10-55%, 10-60%, 10-65%, 10-70%, 10-75%, 10-80%, 10-85%, 10-90%, 10-95%, 15-25%, 15-30%, 15-35%, 1540%, 1545%, 15-50%, 15-55%, 15-60%, 15-65%, 15-70%, 15-75%, 15-80%, 15-85%, 15-90%, 15-95%, 20-30%, 20-35%, 2040%, 20-45%, 20-50%, 20-55%, 20-60%, 20-65%, 20-70%, 20-75%, 20-80%, 20-85%, 20-90%, 20-95%, 25-35%, 25-40%, 25-45%, 25-50%, 25-55%, 25-60%, 25-65%, 25-70%, 25-75%, 25-80%, 25-85%, 25-90%, 25-95%, 3040%, 3045%, 30-50%, 30-55%, 30-60%, 30-65%, 30-70%, 30-75%, 30-80%, 30-85%, 30-90%, 30-95%, 3545%, 35-50%, 35-55%, 35-60%, 35-65%, 35-70%, 35-75%, 35-80%, 35-85%, 35-90%, 35-95%, 40-50%, 40-55%, 40-60%, 40-65%, 40-70%, 40-75%, 40-80%, 40-85%, 40-90%, 40-95%, 45-55%, 45-60%, 45-65%, 45-70%, 45-75%, 45-80%, 45-85%, 45-90%, 45-95%, 50-60%, 50-65%, 50-70%, 50-75%, 50-80%, 50-85%, 50-90%, 50-95%, 55-65%, 55-70%, 55-75%, 55-80%, 55-85%, 55-90%, 55-95%, 60-70%, 60-75%, 60-80%, 60-85%, 60-90%, 60-95%, 65-75%, 65-80%, 65-85%, 65-90%, 65-95%, 70-80%, 70-85%, 70-90%, 70-95%, 75-85%, 75-90%, 75-95%, 80-90%, 80-95%, or 90-95%. As a non-limiting example, a subject may have a decrease of 70% of target protein. As a non-limiting example, a subject may have a 50% decrease of target protein. As a non-limiting example, a subject may have a 40% decrease of target protein. As a non-limiting example, a subject may have a decrease of 10% of target protein.

### V. KITS AND DEVICES

### Kits

[0682] In one embodiment, the disclosure provides a variety of kits for conveniently and/or effectively carrying out methods described herein. Typically, kits will comprise sufficient amounts and/or numbers of components to allow a user to perform multiple treatments of a subject(s) and/or to perform multiple experiments.

[0683] Any of the AAV particles of the present disclosure may be comprised in a kit. In some embodiments, kits may further include reagents and/or instructions for creating and/or synthesizing compounds and/or compositions described herein. In some embodiments, kits may also include one or more buffers. In some embodiments, kits may include components for making protein or nucleic acid arrays or libraries and thus, may include, for example, solid supports.

[0684] In some embodiments, kit components may be packaged either in aqueous media or in lyophilized form. The container means of the kits will generally include at least one vial, test tube, flask, bottle, syringe or other container means, into which a component may be placed, and preferably, suitably aliquoted. Where there is more than one kit component, (labeling reagent and label may be packaged together), kits may also generally contain second, third or other additional containers into which additional components may be separately placed. In some embodiments, kits may also comprise second container means for containing sterile, pharmaceutically acceptable buffers and/or other diluents. In some embodiments, various combinations of components may be comprised in one or more vial. Kits may also typically include means for containing compounds and/or compositions described herein, e.g., proteins, nucleic acids, and any other reagent containers in close confinement for commercial sale. Such containers may include injection or blow-molded plastic containers into which desired vials are retained.

[0685] In some embodiments, kit components are provided in one and/or more liquid solutions. In some embodiments, liquid solutions are aqueous solutions, with sterile aqueous solutions being particularly preferred. In some embodiments, kit components may be provided as dried powder(s). When reagents and/or components are provided as dry powders, such powders may be reconstituted by the addition of suitable volumes of solvent. In some embodiments, it is envisioned that solvents may also be provided in another container means. In some embodiments, labeling dyes are provided as dried powders. In some embodiments, it is contemplated that 10, 20, 30, 40, 50, 60, 70, 80, 90, 100, 120, 120, 130, 140, 150, 160, 170, 180, 190, 200, 300, 400, 500, 600, 700, 800, 900, 1000 micrograms or at least or at most those amounts of dried dye are provided in kits described herein. In such embodiments, dye may then be resuspended in any suitable solvent, such as DMSO.

[0686] In some embodiments, kits may include instructions for employing kit components as well the use of any other reagent not included in the kit. Instructions may include variations that may be implemented.

### Devices

[0687] In one embodiment, the AAV particles may delivered to a subject using a device to deliver the AAV particles and a head fixation assembly. The head fixation assembly may be, but is not limited to, any of the head fixation assemblies sold by MRI interventions. As a non-limiting example, the head fixation assembly may be any of the assemblies described in U.S. Pat. Nos. 8,099,150, 8,548,569 and 9,031,636 and International Patent Publication Nos. WO201108495 and WO2014014585, the contents of each of which are incorporated by reference in their entirety. A head fixation assembly may be used in combination with an MRI compatible drill such as, but not limited to, the MR compatible drills described in International Patent Publication No. WO2013181008 and US Patent Publication No. US20130325012, the contents of which are herein incorporated by reference in their entirety.

[0688] In one embodiment, the AAV particles may be delivered using a method, system and/or computer program for positioning apparatus to a target point on a subject to deliver the AAV particles. As a non-limiting example, the method, system and/or computer program may be the methods, systems and/or computer programs described in U.S. Pat. No. 8,340,743, the contents of which are herein incorporated by reference in their entirety. The method may include: determining a target point in the body and a reference point, wherein the target point and the reference point define a planned trajectory line (PTL) extending through each; determining a visualization plane, wherein the PTL intersects the visualization plane at a sighting point; mounting the guide device relative to the body to move with respect to the PTL, wherein the guide device does not intersect the visualization plane; determining a point of intersection (GPP) between the guide axis and the visualization plane; and aligning the GPP with the sighting point in the visualization plane.

[0689] In one embodiment, the AAV particles may be delivered to a subject using a convention-enhanced delivery device. Non-limiting examples of targeted delivery of drugs using convection are described in US Patent Publication Nos. US20100217228, US20130035574 and US20130035660 and International Patent Publication No. WO2013019830 and WO2008144585, the contents of each of which are herein incorporated by reference in their entirety.

[0690] In one embodiment, a subject may be imaged prior to, during and/or after delivery of the AAV particles. The imaging method may be a method known in the art and/or described herein, such as but not limited to, magnetic resonance imaging (MRI). As a non-limiting example, imaging may be used to assess therapeutic effect. As another non-limiting example, imaging may be used for assisted delivery of AAV particles.

[0691] In one embodiment, the AAV particles may be delivered using an MRI-guided device. Non-limiting examples of MRI-guided devices are described in U.S. Pat. Nos. 9,055,884, 9,042,958, 8,886,288, 8,768.433, 8,396,532, 8,369,930, 8,374,677 and 8,175,677 and US Patent Application No. US20140024927 the contents of each of which are herein incorporated by reference in their entireties. As a non-limiting example, the MRI-guided device may be able to provide data in real time such as those described in U.S. Pat. Nos. 8,886,288 and 8,768,433, the contents of each of which are herein incorporated by reference in their entirety. As another non-limiting example, the MRI-guided device or system may be used with a targeting cannula such as the systems described in U.S. Pat. Nos. 8,175,677 and 8,374,677, the contents of each of which are herein incorporated by reference in their entireties. As yet another non-limiting example, the MRI-guided device includes a trajectory guide frame for guiding an interventional device as described, for example, in U.S. Pat. No. 9,055,884 and US Patent Application No. US20140024927, the contents of each of which are herein incorporated by reference in their entireties.

[0692] In one embodiment, the AAV particles may be delivered using an MRI-compatible tip assembly. Non-limiting examples of MRI-compatible tip assemblies are described in US Patent Publication No. US20140275980, the content of which is herein incorporated by reference in its entirety.

[0693] In one embodiment, the AAV particles may be delivered using a cannula which is MRI-compatible. Non-limiting examples of MRI-compatible cannulas include those taught in International Patent Publication No. WO2011130107, the contents of which are herein incorporated by reference in their entirety.

[0694] In one embodiment, the AAV particles may be delivered using a catheter which is MRI-compatible. Non-limiting examples of MRI-compatible catheters include those taught in International Patent Publication No. WO2012116265, U.S. Pat. No. 8,825,133 and US Patent Publication No. US20140024909, the contents of each of which are herein incorporated by reference in their entirety.

[0695] In one embodiment, the AAV particles may be delivered using a device with an elongated tubular body and a diaphragm as described in US Patent Publication Nos. US20140276582 and US20140276614, the contents of each of which are herein incorporated by reference in their entirety.

[0696] In one embodiment, the AAV particles may be delivered using an MRI compatible localization and/or guidance system such as, but not limited to, those described in US Patent Publication Nos. US20150223905 and US20150230871, the contents of each of which are herein incorporated by reference in their entireties. As a non-limiting example, the MRI compatible localization and/or guidance systems may comprise a mount adapted for fixation to a patient, a targeting cannula with a lumen configured to attach to the mount so as to be able to controllably translate in at least three dimensions, and an elongate probe configured to snugly advance via slide and retract in the targeting cannula lumen, the elongate probe comprising at least one of a stimulation or recording electrode.

[0697] In one embodiment, the AAV particles may be delivered to a subject using a trajectory frame as described in US Patent Publication Nos. US20150031982 and US20140066750 and International Patent Publication Nos. WO2015057807 and WO2014039481, the contents of each of which are herein incorporated by reference in their entirety.

[0698] In one embodiment, the AAV particles may be delivered to a subject using a gene gun.

### VI. DEFINITIONS

[0699] At various places in the present specification, substituents of compounds of the present disclosure are disclosed in groups or in ranges. It is specifically intended that the present disclosure include each and every individual subcombination of the members of such groups and ranges.

[0700] Unless stated otherwise, the following terms and phrases have the meanings described below. The definitions are not meant to be limiting in nature and serve to provide a clearer understanding of certain aspects of the present disclosure.

[0701] About: As used herein, the term “about” means+/−10% of the recited value.

[0702] Adeno-associated virus: The term “adeno-associated virus” or “AAV” as used herein refers to members of the dependovirus genus comprising any particle, sequence, gene, protein, or component derived therefrom.

[0703] AAV Particle: As used herein, an “AAV particle” is a virus which comprises a capsid and a viral genome with at least one payload region and at least one ITR region. AAV particles of the present disclosure may be produced recombinantly and may be based on adeno-associated virus (AAV) parent or reference sequences. AAV particle may be derived from any serotype, described herein or known in the art, including combinations of serotypes (i.e., “pseudotyped” AAV) or from various genomes (e.g., single stranded or self-complementary). In addition, the AAV particle may be replication defective and/or targeted.

[0704] Activity: As used herein, the term “activity” refers to the condition in which things are happening or being done. Compositions of the disclosure may have activity and this activity may involve one or more biological events.

[0705] Administering: As used herein, the term “administering” refers to providing a pharmaceutical agent or composition to a subject.

[0706] Administered in combination: As used herein, the term “administered in combination” or “combined administration” means that two or more agents are administered to a subject at the same time or within an interval such that there may be an overlap of an effect of each agent on the patient. In some embodiments, they are administered within about 60, 30, 15, 10, 5, or 1 minute of one another. In some embodiments, the administrations of the agents are spaced sufficiently closely together such that a combinatorial (e.g., a synergistic) effect is achieved.

[0707] Amelioration: As used herein, the term “amelioration” or “ameliorating” refers to a lessening of severity of at least one indicator of a condition or disease. For example, in the context of neurodegeneration disorder, amelioration includes the reduction of neuron loss.

[0708] Animal: As used herein, the term “animal” refers to any member of the animal kingdom. In some embodiments, “animal” refers to humans at any stage of development. In some embodiments, “animal” refers to non-human animals at any stage of development. In certain embodiments, the non-human animal is a mammal (e.g., a rodent, a mouse, a rat, a rabbit, a monkey, a dog, a cat, a sheep, cattle, a primate, or a pig). In some embodiments, animals include, but are not limited to, mammals, birds, reptiles, amphibians, fish, and worms. In some embodiments, the animal is a transgenic animal, genetically-engineered animal, or a clone.

[0709] Antisense strand: As used herein, the term “the antisense strand” or “the first strand” or “the guide strand” of a siRNA molecule refers to a strand that is substantially complementary to a section of about 10-50 nucleotides, e.g., about 15-30, 16-25, 18-23 or 19-22 nucleotides of the mRNA of the gene targeted for silencing. The antisense strand or first strand has sequence sufficiently complementary to the desired target mRNA sequence to direct target-specific silencing, e.g., complementarity sufficient to trigger the destruction of the desired target mRNA by the RNAi machinery or process.

[0710] Approximately: As used herein, the term “approximately” or “about,” as applied to one or more values of interest, refers to a value that is similar to a stated reference value. In certain embodiments, the term “approximately” or “about” refers to a range of values that fall within 25%, 20%, 19%, 18%, 17%, 16%, 15%, 14%, 13%, 12%, 11%, 10%, 9%, 8%, 7%, 6%, 5%, 4%, 3%, 2%, 1%, or less in either direction (greater than or less than) of the stated reference value unless otherwise stated or otherwise evident from the context (except where such number would exceed 100% of a possible value).

[0711] Associated with: As used herein, the terms “associated with,” “conjugated,” “linked,” “attached,” and “tethered,” when used with respect to two or more moieties, means that the moieties are physically associated or connected with one another, either directly or via one or more additional moieties that serves as a linking agent, to form a structure that is sufficiently stable so that the moieties remain physically associated under the conditions in which the structure is used, e.g., physiological conditions. An “association” need not be strictly through direct covalent chemical bonding. It may also suggest ionic or hydrogen bonding or a hybridization based connectivity sufficiently stable such that the “associated” entities remain physically associated.

[0712] Bifunctional: As used herein, the term “bifunctional” refers to any substance, molecule or moiety which is capable of or maintains at least two functions. The functions may affect the same outcome or a different outcome. The structure that produces the function may be the same or different.

[0713] Biocompatible: As used herein, the term “biocompatible” means compatible with living cells, tissues, organs or systems posing little to no risk of injury, toxicity or rejection by the immune system.

[0714] Biodegradable: As used herein, the term “biodegradable” means capable of being broken down into innocuous products by the action of living things.

[0715] Biologically active: As used herein, the phrase “biologically active” refers to a characteristic of any substance that has activity in a biological system and/or organism. For instance, a substance that, when administered to an organism, has a biological effect on that organism, is considered to be biologically active. In particular embodiments, an AAV particle of described herein may be considered biologically active if even a portion of the encoded payload is biologically active or mimics an activity considered biologically relevant.

[0716] Capsid: As used herein, the term “capsid” refers to the protein shell of a virus particle.

[0717] Complementary and substantially complementary: As used herein, the term “complementary” refers to the ability of polynucleotides to form base pairs with one another. Base pairs are typically formed by hydrogen bonds between nucleotide units in antiparallel polynucleotide strands. Complementary polynucleotide strands can form base pair in the Watson-Crick manner (e.g., A to T, A to U. C to G), or in any other manner that allows for the formation of duplexes. As persons skilled in the art are aware, when using RNA as opposed to DNA, uracil rather than thymine is the base that is considered to be complementary to adenosine. However, when a U is denoted in the context of the present disclosure, the ability to substitute a T is implied, unless otherwise stated. Perfect complementarity or 100% complementarity refers to the situation in which each nucleotide unit of one polynucleotide strand can form hydrogen bond with a nucleotide unit of a second polynucleotide strand. Less than perfect complementarity refers to the situation in which some, but not all, nucleotide units of two strands can form hydrogen bond with each other. For example, for two 20-mers, if only two base pairs on each strand can form hydrogen bond with each other, the polynucleotide strands exhibit 10% complementarity. In the same example, if 18 base pairs on each strand can form hydrogen bonds with each other, the polynucleotide strands exhibit 90% complementarity. As used herein, the term “substantially complementary” means that the siRNA has a sequence (e.g., in the antisense strand) which is sufficient to bind the desired target mRNA, and to trigger the RNA silencing of the target mRNA.

[0718] Compound: Compounds of the present disclosure include all of the isotopes of the atoms occurring in the intermediate or final compounds. “Isotopes” refers to atoms having the same atomic number but different mass numbers resulting from a different number of neutrons in the nuclei. For example, isotopes of hydrogen include tritium and deuterium.

[0719] The compounds and salts of the present disclosure can be prepared in combination with solvent or water molecules to form solvates and hydrates by routine methods.

[0720] Conditionally active: As used herein, the term “conditionally active” refers to a mutant or variant of a wild-type polypeptide, wherein the mutant or variant is more or less active at physiological conditions than the parent polypeptide. Further, the conditionally active polypeptide may have increased or decreased activity at aberrant conditions as compared to the parent polypeptide. A conditionally active polypeptide may be reversibly or irreversibly inactivated at normal physiological conditions or aberrant conditions.

[0721] Conserved: As used herein, the term “conserved” refers to nucleotides or amino acid residues of a polynucleotide sequence or polypeptide sequence, respectively, that are those that occur unaltered in the same position of two or more sequences being compared. Nucleotides or amino acids that are relatively conserved are those that are conserved amongst more related sequences than nucleotides or amino acids appearing elsewhere in the sequences.

[0722] In some embodiments, two or more sequences are said to be “completely conserved” if they are 100% identical to one another. In some embodiments, two or more sequences are said to be “highly conserved” if they are at least 70% identical, at least 80% identical, at least 90% identical, or at least 95% identical to one another. In some embodiments, two or more sequences are said to be “highly conserved” if they are about 70% identical, about 80% identical, about 90% identical, about 95%, about 98%, or about 99% identical to one another. In some embodiments, two or more sequences are said to be “conserved” if they are at least 30% identical, at least 40% identical, at least 50% identical, at least 60% identical, at least 70% identical, at least 80% identical, at least 90% identical, or at least 95% identical to one another. In some embodiments, two or more sequences are said to be “conserved” if they are about 30% identical, about 40% identical, about 50% identical, about 60% identical, about 70% identical, about 80% identical, about 90% identical, about 95% identical, about 98% identical, or about 99% identical to one another. Conservation of sequence may apply to the entire length of a polynucleotide or polypeptide or may apply to a portion, region or feature thereof.

[0723] Control Elements: As used herein, “control elements”. “regulatory control elements” or “regulatory sequences” refers to promoter regions, polyadenylation signals, transcription termination sequences, upstream regulatory domains, origins of replication, internal ribosome entry sites (“IRES”), enhancers, and the like, which provide for the replication, transcription and translation of a coding sequence in a recipient cell. Not all of these control elements need always be present as long as the selected coding sequence is capable of being replicated, transcribed and/or translated in an appropriate host cell.

[0724] Controlled Release: As used herein, the term “controlled release” refers to a pharmaceutical composition or compound release profile that conforms to a particular pattern of release to affect a therapeutic outcome.

[0725] Cytostatic: As used herein, “cytostatic” refers to inhibiting, reducing, suppressing the growth, division, or multiplication of a cell (e.g., a mammalian cell (e.g., a human cell)), bacterium, virus, fungus, protozoan, parasite, prion, or a combination thereof.

[0726] Cytotoxic: As used herein, “cytotoxic” refers to killing or causing injurious, toxic, or deadly effect on a cell (e.g., a mammalian cell (e.g., a human cell)), bacterium, virus, fungus, protozoan, parasite, prion, or a combination thereof.

[0727] Delivery: As used herein, “delivery” refers to the act or manner of delivering an AAV particle, a compound, substance, entity, moiety, cargo or payload.

[0728] Delivery Agent: As used herein, “delivery agent” refers to any substance which facilitates, at least in part, the in vivo delivery of an AAV particle to targeted cells.

[0729] Destabilized: As used herein, the term “destable,” “destabilize,” or “destabilizing region” means a region or molecule that is less stable than a starting, wild-type or native form of the same region or molecule.

[0730] Detectable label: As used herein, “detectable label” refers to one or more markers, signals, or moieties which are attached, incorporated or associated with another entity that is readily detected by methods known in the art including radiography, fluorescence, chemiluminescence, enzymatic activity, absorbance and the like. Detectable labels include radioisotopes, fluorophores, chromophores, enzymes, dyes, metal ions, ligands such as biotin, avidin, streptavidin and haptens, quantum dots, and the like. Detectable labels may be located at any position in the peptides or proteins disclosed herein. They may be within the amino acids, the peptides, or proteins, or located at the N- or C-termini.

[0731] Digest: As used herein, the term “digest” means to break apart into smaller pieces or components. When referring to polypeptides or proteins, digestion results in the production of peptides.

[0732] Distal: As used herein, the term “distal” means situated away from the center or away from a point or region of interest.

[0733] Dosing regimen: As used herein, a “dosing regimen” is a schedule of administration or physician determined regimen of treatment, prophylaxis, or palliative care.

[0734] Encapsulate: As used herein, the term “encapsulate” means to enclose, surround or encase.

[0735] Engineered: As used herein, “engineered” indicates when a wild type or native molecule is designed to have a feature or property, whether structural or chemical, that varies from the starting point.

[0736] Effective Amount: As used herein, the term “effective amount” of an agent is that amount sufficient to effect beneficial or desired results, for example, clinical results, and, as such, an “effective amount” depends upon the context in which it is being applied. For example, in the context of administering an agent that treats cancer, an effective amount of an agent is, for example, an amount sufficient to achieve treatment, as defined herein, of cancer, as compared to the response obtained without administration of the agent.

[0737] Expression: As used herein, “expression” of a nucleic acid sequence refers to one or more of the following events: (1) production of an RNA template from a DNA sequence (e.g., by transcription); (2) processing of an RNA transcript (e.g., by splicing, editing, 5′ cap formation, and/or 3′ end processing); (3) translation of an RNA into a polypeptide or protein; and (4) post-translational modification of a polypeptide or protein.

[0738] Feature: As used herein, a “feature” refers to a characteristic, a property, or a distinctive element.

[0739] Formulation: As used herein, a “formulation” includes at least one AAV particle and a delivery agent.

[0740] Fragment: A “fragment,” as used herein, refers to a portion. For example, fragments of proteins may comprise polypeptides obtained by digesting full-length protein isolated from cultured cells.

[0741] Functional: As used herein, a “functional” biological molecule is a biological molecule in a form in which it exhibits a property and/or activity by which it is characterized.

[0742] Gene expression: The term “gene expression” refers to the process by which a nucleic acid sequence undergoes successful transcription and in most instances translation to produce a protein or peptide. For clarity, when reference is made to measurement of “gene expression”, this should be understood to mean that measurements may be of the nucleic acid product of transcription, e.g., RNA or mRNA or of the amino acid product of translation, e.g., polypeptides or peptides. Methods of measuring the amount or levels of RNA, mRNA, polypeptides and peptides are well known in the art.

[0743] Homology: As used herein, the term “homology” refers to the overall relatedness between polymeric molecules, e.g. between polynucleotide molecules (e.g. DNA molecules and/or RNA molecules) and/or between polypeptide molecules. In some embodiments, polymeric molecules are considered to be “homologous” to one another if their sequences are at least 25%, 30%, 35%, 40%, 45%, 50%, 55%, 60%, 65%, 70%, 75%, 80%, 85%, 90%, 95%, or 99% identical or similar. The term “homologous” necessarily refers to a comparison between at least two sequences (polynucleotide or polypeptide sequences). In accordance with the disclosure, two polynucleotide sequences are considered to be homologous if the polypeptides they encode are at least about 50%, 60%, 70%, 80%, 90%, 95%, or even 99% for at least one stretch of at least about 20 amino acids. In some embodiments, homologous polynucleotide sequences are characterized by the ability to encode a stretch of at least 4-5 uniquely specified amino acids. For polynucleotide sequences less than 60 nucleotides in length, homology is determined by the ability to encode a stretch of at least 4-5 uniquely specified amino acids. In accordance with the disclosure, two protein sequences are considered to be homologous if the proteins are at least about 50%, 60%, 70%, 80%, or 90% identical for at least one stretch of at least about 20 amino acids.

[0744] Heterologous Region: As used herein the term “heterologous region” refers to a region which would not be considered a homologous region.

[0745] Homologous Region: As used herein the term “homologous region” refers to a region which is similar in position, structure, evolution origin, character, form or function.

[0746] Identity: As used herein, the term “identity” refers to the overall relatedness between polymeric molecules, e.g., between polynucleotide molecules (e.g. DNA molecules and/or RNA molecules) and/or between polypeptide molecules. Calculation of the percent identity of two polynucleotide sequences, for example, can be performed by aligning the two sequences for optimal comparison purposes (e.g., gaps can be introduced in one or both of a first and a second nucleic acid sequences for optimal alignment and non-identical sequences can be disregarded for comparison purposes). In certain embodiments, the length of a sequence aligned for comparison purposes is at least 30%, at least 40%, at least 50%, at least 60%, at least 70%, at least 80%, at least 90%, at least 95%, or 100% of the length of the reference sequence. The nucleotides at corresponding nucleotide positions are then compared. When a position in the first sequence is occupied by the same nucleotide as the corresponding position in the second sequence, then the molecules are identical at that position. The percent identity between the two sequences is a function of the number of identical positions shared by the sequences, taking into account the number of gaps, and the length of each gap, which needs to be introduced for optimal alignment of the two sequences. The comparison of sequences and determination of percent identity between two sequences can be accomplished using a mathematical algorithm. For example, the percent identity between two nucleotide sequences can be determined using methods such as those described in Computational Molecular Biology, Lesk, A. M., ed., Oxford University Press, New York, 1988; Biocomputing: Informatics and Genome Projects, Smith, D. W., ed., Academic Press, New York, 1993; Sequence Analysis in Molecular Biology. von Heinje, G., Academic Press, 1987. Computer Analysis of Sequence Data, Part I, Griffin, A. M., and Griffin, H. G., eds., Humana Press. New Jersey, 1994; and Sequence Analysis Primer, Gribskov, M. and Devereux, J., eds., M Stockton Press, New York, 1991; each of which is incorporated herein by reference. For example, the percent identity between two nucleotide sequences can be determined using the algorithm of Meyers and Miller (CABIOS, 1989, 4:11-17), which has been incorporated into the ALIGN program (version 2.0) using a PAM120 weight residue table, a gap length penalty of 12 and a gap penalty of 4. The percent identity between two nucleotide sequences can, alternatively, be determined using the GAP program in the GCG software package using an NWSgapdna.CMP matrix. Methods commonly employed to determine percent identity between sequences include, but are not limited to those disclosed in Carillo, H., and Lipman, D., SIAM J Applied Math., 48:1073 (1988); incorporated herein by reference. Techniques for determining identity are codified in publicly available computer programs. Exemplary computer software to determine homology between two sequences include, but are not limited to, GCG program package, Devereux, J., et al., Nucleic Acids Research, 12(1), 387 (1984)), BLASTP, BLASTN, and FASTA Altschul, S. F. et al., J. Molec. Biol., 215, 403 (1990)).

[0747] Inhibit expression of a gene: As used herein, the phrase “inhibit expression of a gene” means to cause a reduction in the amount of an expression product of the gene. The expression product can be an RNA transcribed from the gene (e.g., an mRNA) or a polypeptide translated from an mRNA transcribed from the gene. Typically, a reduction in the level of an mRNA results in a reduction in the level of a polypeptide translated therefrom. The level of expression may be determined using standard techniques for measuring mRNA or protein.

[0748] In vitro: As used herein, the term “in vitro” refers to events that occur in an artificial environment, e.g., in a test tube or reaction vessel, in cell culture, in a Petri dish, etc., rather than within an organism (e.g., animal, plant, or microbe).

[0749] In vivo: As used herein, the term “in vivo” refers to events that occur within an organism (e.g., animal, plant, or microbe or cell or tissue thereof).

[0750] Isolated: As used herein, the term “isolated” refers to a substance or entity that has been separated from at least some of the components with which it was associated (whether in nature or in an experimental setting). Isolated substances may have varying levels of purity in reference to the substances from which they have been associated. Isolated substances and/or entities may be separated from at least about 10%, about 20%, about 30%, about 40%, about 50%, about 60%, about 70%, about 80%, about 90%, or more of the other components with which they were initially associated. In some embodiments, isolated agents are more than about 80%, about 85%, about 90%, about 91%, about 92%, about 93%, about 94%, about 95%, about 96%, about 97%, about 98%, about 99%, or more than about 99% pure. As used herein, a substance is “pure” if it is substantially free of other components.

[0751] Substantially isolated: By “substantially isolated” is meant that a substance is substantially separated from the environment in which it was formed or detected. Partial separation can include, for example, a composition enriched in the substance or AAV particles of the present disclosure. Substantial separation can include compositions containing at least about 50%, at least about 60%, at least about 70%, at least about 80%, at least about 90%, at least about 95%, at least about 97%, or at least about 99% by weight of the compound of the present disclosure, or salt thereof. Methods for isolating compounds and their salts are routine in the art.

[0752] Linker: As used herein “linker” refers to a molecule or group of molecules which connects two molecules. A linker may be a nucleic acid sequence connecting two nucleic acid sequences encoding two different polypeptides. The linker may or may not be translated. The linker may be a cleavable linker.

[0753] MicroRNA (miRNA) binding site: As used herein, a microRNA (miRNA) binding site represents a nucleotide location or region of a nucleic acid transcript to which at least the “seed” region of a miRNA binds.

[0754] Modified: As used herein “modified” refers to a changed state or structure of a molecule described herein. Molecules may be modified in many ways including chemically, structurally, and functionally.

[0755] Mutation: As used herein, the term “mutation” refers to any changing of the structure of a gene, resulting in a variant (also called “mutant”) form that may be transmitted to subsequent generations. Mutations in a gene may be caused by the alternation of single base in DNA, or the deletion, insertion, or rearrangement of larger sections of genes or chromosomes.

[0756] Naturally Occurring: As used herein, “naturally occurring” or “wild-type” means existing in nature without artificial aid, or involvement of the hand of man.

[0757] Non-human vertebrate: As used herein, a “non-human vertebrate” includes all vertebrates except Homo sapiens, including wild and domesticated species. Examples of non-human vertebrates include, but are not limited to, mammals, such as alpaca, banteng, bison, camel, cat, cattle, deer, dog, donkey, gayal, goat, guinea pig, horse, llama, mule, pig, rabbit, reindeer, sheep water buffalo, and yak.

[0758] Off-target: As used herein, “off target” refers to any unintended effect on any one or more target, gene, or cellular transcript.

[0759] Open reading frame: As used herein, “open reading frame” or “ORF” refers to a sequence which does not contain a stop codon in a given reading frame.

[0760] Operably linked: As used herein, the phrase “operably linked” refers to a functional connection between two or more molecules, constructs, transcripts, entities, moieties or the like.

[0761] Particle: As used herein, a “particle” is a virus comprised of at least two components, a protein capsid and a polynucleotide sequence enclosed within the capsid.

[0762] Patient: As used herein, “patient” refers to a subject who may seek or be in need of treatment, requires treatment, is receiving treatment, will receive treatment, or a subject who is under care by a trained professional for a particular disease or condition.

[0763] Payload: As used herein, “payload” or “payload region” refers to one or more polynucleotides or polynucleotide regions encoded by or within a viral genome or an expression product of such polynucleotide or polynucleotide region, e.g., a transgene, a polynucleotide encoding a polypeptide or multi-polypeptide or a modulatory nucleic acid or regulatory nucleic acid.

[0764] Peptide: As used herein, “peptide” is less than or equal to 50 amino acids long, e.g., about 5, 10, 15, 20, 25, 30, 35, 40, 45, or 50 amino acids long.

[0765] Pharmaceutically acceptable: The phrase “pharmaceutically acceptable” is employed herein to refer to those compounds, materials, compositions, and/or dosage forms which are, within the scope of sound medical judgment, suitable for use in contact with the tissues of human beings and animals without excessive toxicity, irritation, allergic response, or other problem or complication, commensurate with a reasonable benefit/risk ratio.

[0766] Pharmaceutically acceptable excipients: The phrase “pharmaceutically acceptable excipient,” as used herein, refers any ingredient other than the compounds described herein (for example, a vehicle capable of suspending or dissolving the active compound) and having the properties of being substantially nontoxic and non-inflammatory in a patient. Excipients may include, for example: antiadherents, antioxidants, binders, coatings, compression aids, disintegrants, dyes (colors), emollients, emulsifiers, fillers (diluents), film formers or coatings, flavors, fragrances, glidants (flow enhancers), lubricants, preservatives, printing inks, sorbents, suspensing or dispersing agents, sweeteners, and waters of hydration. Exemplary excipients include, but are not limited to: butylated hydroxytoluene (BHT), calcium carbonate, calcium phosphate (dibasic), calcium stearate, croscarmellose, crosslinked polyvinyl pyrrolidone, citric acid, crospovidone, cysteine, ethylcellulose, gelatin, hydroxypropyl cellulose, hydroxypropyl methylcellulose, lactose, magnesium stearate, maltitol, mannitol, methionine, methylcellulose, methyl paraben, microcrystalline cellulose, polyethylene glycol, polyvinyl pyrrolidone, povidone, pregelatinized starch, propyl paraben, retinyl palmitate, shellac, silicon dioxide, sodium carboxymethyl cellulose, sodium citrate, sodium starch glycolate, sorbitol, starch (corn), stearic acid, sucrose, talc, titanium dioxide, vitamin A, vitamin E, vitamin C. and xylitol.

[0767] Pharmaceutically acceptable salts: The present disclosure also includes pharmaceutically acceptable salts of the compounds described herein. As used herein, “pharmaceutically acceptable salts” refers to derivatives of the disclosed compounds wherein the parent compound is modified by converting an existing acid or base moiety to its salt form (e.g., by reacting the free base group with a suitable organic acid). Examples of pharmaceutically acceptable salts include, but are not limited to, mineral or organic acid salts of basic residues such as amines; alkali or organic salts of acidic residues such as carboxylic acids; and the like. Representative acid addition salts include acetate, acetic acid, adipate, alginate, ascorbate, aspartate, benzenesulfonate, benzene sulfonic acid, benzoate, bisulfate, borate, butyrate, camphorate, camphorsulfonate, citrate, cyclopentanepropionate, digluconate, dodecylsulfate, ethanesulfonate, fumarate, glucoheptonate, glycerophosphate, hemisulfate, heptonate, hexanoate, hydrobromide, hydrochloride, hydroiodide, 2-hydroxy-ethanesulfonate, lactobionate, lactate, laurate, lauryl sulfate, malate, maleate, malonate, methanesulfonate, 2-naphthalenesulfonate, nicotinate, nitrate, olcate, oxalate, palmitate, pamoate, pectinate, persulfate, 3-phenylpropionate, phosphate, picrate, pivalate, propionate, stearate, succinate, sulfate, tartrate, thiocyanate, toluenesulfonate, undecanoate, valerate salts, and the like. Representative alkali or alkaline earth metal salts include sodium, lithium, potassium, calcium, magnesium, and the like, as well as nontoxic ammonium, quaternary ammonium, and amine cations, including, but not limited to ammonium, tetramethylammonium, tetraethylammonium, methylamine, dimethylamine, trimethylamine, triethylamine, ethylamine, and the like. The pharmaceutically acceptable salts of the present disclosure include the conventional non-toxic salts of the parent compound formed, for example, from non-toxic inorganic or organic acids. The pharmaceutically acceptable salts of the present disclosure can be synthesized from the parent compound which contains a basic or acidic moiety by conventional chemical methods. Generally, such salts can be prepared by reacting the free acid or base forms of these compounds with a stoichiometric amount of the appropriate base or acid in water or in an organic solvent, or in a mixture of the two; generally, nonaqueous media like ether, ethyl acetate, ethanol, isopropanol, or acetonitrile are preferred. Lists of suitable salts are found in Remington's Pharmaceutical Sciences, 17th ed., Mack Publishing Company, Easton. Pa., 1985, p. 1418, Pharmaceutical Salts: Properties. Selection, and Use, P. H. Stahl and C. G. Wermuth (eds.), Wiley-VCH, 2008, and Berge et al., Journal of Pharmaceutical Science, 66, 1-19 (1977), each of which is incorporated herein by reference in its entirety.

[0768] Pharmaceutically acceptable solvate: The term “pharmaceutically acceptable solvate,” as used herein, means a compound wherein molecules of a suitable solvent are incorporated in the crystal lattice. A suitable solvent is physiologically tolerable at the dosage administered. For example, solvates may be prepared by crystallization, recrystallization, or precipitation from a solution that includes organic solvents, water, or a mixture thereof. Examples of suitable solvents are ethanol, water (for example, mono-, di-, and tri-hydrates), N-methylpyrrolidinone (NMP), dimethyl sulfoxide (DMSO), N,N′-dimethylformamide (DMF), N,N′-dimethylacetamide (DMAC), 1,3-dimethyl-2-imidazolidinone (DMEU), 1,3-dimethyl-3,4,5,6-tetrahydro-2-(1H)-pyrimidinone (DMPU), acetonitrile (ACN), propylene glycol, ethyl acetate, benzyl alcohol, 2-pyrrolidone, benzyl benzoate, and the like. When water is the solvent, the solvate is referred to as a “hydrate.”

[0769] Pharmacokinetic: As used herein, “pharmacokinetic” refers to any one or more properties of a molecule or compound as it relates to the determination of the fate of substances administered to a living organism. Pharmacokinetics is divided into several areas including the extent and rate of absorption, distribution, metabolism and excretion. This is commonly referred to as ADME where: (A) Absorption is the process of a substance entering the blood circulation; (D) Distribution is the dispersion or dissemination of substances throughout the fluids and tissues of the body. (M) Metabolism (or Biotransformation) is the irreversible transformation of parent compounds into daughter metabolites; and (E) Excretion (or Elimination) refers to the elimination of the substances from the body. In rare cases, some drugs irreversibly accumulate in body tissue.

[0770] Physicochemical: As used herein, “physicochemical” means of or relating to a physical and/or chemical property.

[0771] Preventing: As used herein, the term “preventing” or “prevention” refers to partially or completely delaying onset of an infection, disease, disorder and/or condition; partially or completely delaying onset of one or more symptoms, features, or clinical manifestations of a particular infection, disease, disorder, and/or condition; partially or completely delaying onset of one or more symptoms, features, or manifestations of a particular infection, disease, disorder, and/or condition; partially or completely delaying progression from an infection, a particular disease, disorder and/or condition; and/or decreasing the risk of developing pathology associated with the infection, the disease, disorder, and/or condition.

[0772] Proliferate: As used herein, the term “proliferate” means to grow, expand or increase or cause to grow, expand or increase rapidly. “Proliferative” means having the ability to proliferate. “Anti-proliferative” means having properties counter to or inapposite to proliferative properties.

[0773] Prophylactic: As used herein, “prophylactic” refers to a therapeutic or course of action used to prevent the spread of disease.

[0774] Prophylaxis: As used herein, a “prophylaxis” refers to a measure taken to maintain health and prevent the spread of disease.

[0775] Protein of interest: As used herein, the terms “proteins of interest” or “desired proteins” include those provided herein and fragments, mutants, variants, and alterations thereof.

[0776] Proximal: As used herein, the term “proximal” means situated nearer to the center or to a point or region of interest.

[0777] Purified: As used herein, “purify,” “purified,” “purification” means to make substantially pure or clear from unwanted components, material defilement, admixture or imperfection. “Purified” refers to the state of being pure. “Purification” refers to the process of making pure.

[0778] Region: As used herein, the term “region” refers to a zone or general area. In some embodiments, when referring to a protein or protein module, a region may comprise a linear sequence of amino acids along the protein or protein module or may comprise a three-dimensional area, an epitope and/or a cluster of epitopes. In some embodiments, regions comprise terminal regions. As used herein, the term “terminal region” refers to regions located at the ends or termini of a given agent. When referring to proteins, terminal regions may comprise N- and/or C-termini. N-termini refer to the end of a protein comprising an amino acid with a free amino group. C-termini refer to the end of a protein comprising an amino acid with a free carboxyl group. N- and/or C-terminal regions may there for comprise the N- and/or C-termini as well as surrounding amino acids. In some embodiments, N- and/or C-terminal regions comprise from about 3 amino acid to about 30 amino acids, from about 5 amino acids to about 40 amino acids, from about 10 amino acids to about 50 amino acids, from about 20 amino acids to about 100 amino acids and/or at least 100 amino acids. In some embodiments, N-terminal regions may comprise any length of amino acids that includes the N-terminus, but does not include the C-terminus. In some embodiments, C-terminal regions may comprise any length of amino acids, which include the C-terminus, but do not comprise the N-terminus.

[0779] In some embodiments, when referring to a polynucleotide, a region may comprise a linear sequence of nucleic acids along the polynucleotide or may comprise a three-dimensional area, secondary structure, or tertiary structure. In some embodiments, regions comprise terminal regions. As used herein, the term “terminal region” refers to regions located at the ends or termini of a given agent. When referring to polynucleotides, terminal regions may comprise 5′ and 3′ termini. 5′ termini refer to the end of a polynucleotide comprising a nucleic acid with a free phosphate group. 3′ termini refer to the end of a polynucleotide comprising a nucleic acid with a free hydroxyl group. 5′ and 3′ regions may there for comprise the 5′ and 3′ termini as well as surrounding nucleic acids. In some embodiments, 5′ and 3′ terminal regions comprise from about 9 nucleic acids to about 90 nucleic acids, from about 15 nucleic acids to about 120 nucleic acids, from about 30 nucleic acids to about 150 nucleic acids, from about 60 nucleic acids to about 300 nucleic acids and/or at least 300 nucleic acids. In some embodiments, 5′ regions may comprise any length of nucleic acids that includes the 5′ terminus, but does not include the 3′ terminus. In some embodiments, 3′ regions may comprise any length of nucleic acids, which include the 3′ terminus, but does not comprise the 5′ terminus.

[0780] RNA or RNA molecule: As used herein, the term “RNA” or “RNA molecule” or “ribonucleic acid molecule” refers to a polymer of ribonucleotides; the term “DNA” or “DNA molecule” or “deoxyribonucleic acid molecule” refers to a polymer of deoxyribonucleotides. DNA and RNA can be synthesized naturally, e.g., by DNA replication and transcription of DNA, respectively; or be chemically synthesized. DNA and RNA can be single-stranded (i.e., ssRNA or ssDNA, respectively) or multi-stranded (e.g., double stranded, i.e., dsRNA and dsDNA, respectively). The term “mRNA” or “messenger RNA”, as used herein, refers to a single stranded RNA that encodes the amino acid sequence of one or more polypeptide chains.

[0781] RNA interfering or RNAi: As used herein, the term “RNA interfering” or “RNAi” refers to a sequence specific regulatory mechanism mediated by RNA molecules which results in the inhibition or interfering or “silencing” of the expression of a corresponding protein-coding gene. RNAi has been observed in many types of organisms, including plants, animals and fungi. RNAi occurs in cells naturally to remove foreign RNAs (e.g., viral RNAs). Natural RNAi proceeds via fragments cleaved from free dsRNA which direct the degradative mechanism to other similar RNA sequences. RNAi is controlled by the RNA-induced silencing complex (RISC) and is initiated by short/small dsRNA molecules in cell cytoplasm, where they interact with the catalytic RISC component argonaute. The dsRNA molecules can be introduced into cells exogenously. Exogenous dsRNA initiates RNAi by activating the ribonuclease protein Dicer, which binds and cleaves dsRNAs to produce double-stranded fragments of 21-25 base pairs with a few unpaired overhang bases on each end. These short double stranded fragments are called small interfering RNAs (siRNAs).

[0782] Sample: As used herein, the term “sample” or “biological sample” refers to a subset of its tissues, cells or component parts (e.g. body fluids, including but not limited to blood, mucus, lymphatic fluid, synovial fluid, cerebrospinal fluid, saliva, amniotic fluid, amniotic cord blood, urine, vaginal fluid and semen). A sample further may include a homogenate, lysate or extract prepared from a whole organism or a subset of its tissues, cells or component parts, or a fraction or portion thereof, including but not limited to, for example, plasma, serum, spinal fluid, lymph fluid, the external sections of the skin, respiratory, intestinal, and genitourinary tracts, tears, saliva, milk, blood cells, tumors, organs. A sample further refers to a medium, such as a nutrient broth or gel, which may contain cellular components, such as proteins or nucleic acid molecule.

[0783] Self-complementary viral particle: As used herein, a “self-complementary viral particle” is a particle comprised of at least two components, a protein capsid and a polynucleotide sequence encoding a self-complementary genome enclosed within the capsid.

[0784] Sense Strand: As used herein, the term “the sense strand” or “the second strand” or “the passenger strand” of a siRNA molecule refers to a strand that is complementary to the antisense strand or first strand. The antisense and sense strands of a siRNA molecule are hybridized to form a duplex structure. As used herein, a “siRNA duplex” includes a siRNA strand having sufficient complementarity to a section of about 10-50 nucleotides of the mRNA of the gene targeted for silencing and a siRNA strand having sufficient complementarity to form a duplex with the other siRNA strand.

[0785] Short interfering RNA or siRNA: As used herein, the terms “short interfering RNA,” “small interfering RNA” or “siRNA” refer to an RNA molecule (or RNA analog) comprising between about 5-60 nucleotides (or nucleotide analogs) which is capable of directing or mediating RNAi. Preferably, a siRNA molecule comprises between about 15-30 nucleotides or nucleotide analogs, such as between about 16-25 nucleotides (or nucleotide analogs), between about 18-23 nucleotides (or nucleotide analogs), between about 19-22 nucleotides (or nucleotide analogs) (e.g., 19, 20, 21 or 22 nucleotides or nucleotide analogs), between about 19-25 nucleotides (or nucleotide analogs), and between about 19-24 nucleotides (or nucleotide analogs). The term “short” siRNA refers to a siRNA comprising 5-23 nucleotides, preferably 21 nucleotides (or nucleotide analogs), for example, 19, 20, 21 or 22 nucleotides. The term “long” siRNA refers to a siRNA comprising 24-60 nucleotides, preferably about 24-25 nucleotides, for example, 23, 24, 25 or 26 nucleotides. Short siRNAs may, in some instances, include fewer than 19 nucleotides, e.g., 16, 17 or 18 nucleotides, or as few as 5 nucleotides, provided that the shorter siRNA retains the ability to mediate RNAi. Likewise, long siRNAs may, in some instances, include more than 26 nucleotides, e.g., 27, 28, 29, 30, 35, 40, 45, 50, 55, or even 60 nucleotides, provided that the longer siRNA retains the ability to mediate RNAi or translational repression absent further processing, e.g., enzymatic processing, to a short siRNA. siRNAs can be single stranded RNA molecules (ss-siRNAs) or double stranded RNA molecules (ds-siRNAs) comprising a sense strand and an antisense strand which hybridized to form a duplex structure called siRNA duplex.

[0786] Signal Sequences: As used herein, the phrase “signal sequences” refers to a sequence which can direct the transport or localization of a protein.

[0787] Single unit dose: As used herein, a “single unit dose” is a dose of any therapeutic administered in one dose/at one time/single route/single point of contact, i.e., single administration event. In some embodiments, a single unit dose is provided as a discrete dosage form (e.g., a tablet, capsule, patch, loaded syringe, vial, etc.).

[0788] Similarity: As used herein, the term “similarity” refers to the overall relatedness between polymeric molecules, e.g. between polynucleotide molecules (e.g. DNA molecules and/or RNA molecules) and/or between polypeptide molecules. Calculation of percent similarity of polymeric molecules to one another can be performed in the same manner as a calculation of percent identity, except that calculation of percent similarity takes into account conservative substitutions as is understood in the art.

[0789] Split dose: As used herein, a “split dose” is the division of single unit dose or total daily dose into two or more doses.

[0790] Stable: As used herein “stable” refers to a compound that is sufficiently robust to survive isolation to a useful degree of purity from a reaction mixture, and preferably capable of formulation into an efficacious therapeutic agent.

[0791] Stabilized: As used herein, the term “stabilize”, “stabilized,” “stabilized region” means to make or become stable.

[0792] Subject: As used herein, the term “subject” or “patient” refers to any organism to which a composition in accordance with the disclosure may be administered, e.g., for experimental, diagnostic, prophylactic, and/or therapeutic purposes. Typical subjects include animals (e.g., mammals such as mice, rats, rabbits, non-human primates, and humans) and/or plants.

[0793] Substantially: As used herein, the term “substantially” refers to the qualitative condition of exhibiting total or near-total extent or degree of a characteristic or property of interest. One of ordinary skill in the biological arts will understand that biological and chemical phenomena rarely, if ever, go to completion and/or proceed to completeness or achieve or avoid an absolute result. The term “substantially” is therefore used herein to capture the potential lack of completeness inherent in many biological and chemical phenomena.

[0794] Substantially equal: As used herein as it relates to time differences between doses, the term means plus/minus 2%.

[0795] Substantially simultaneously: As used herein and as it relates to plurality of doses, the term means within 2 seconds.

[0796] Suffering from: An individual who is “suffering from” a disease, disorder, and/or condition has been diagnosed with or displays one or more symptoms of a disease, disorder, and/or condition.

[0797] Susceptible to: An individual who is “susceptible to” a disease, disorder, and/or condition has not been diagnosed with and/or may not exhibit symptoms of the disease, disorder, and/or condition but harbors a propensity to develop a disease or its symptoms. In some embodiments, an individual who is susceptible to a disease, disorder, and/or condition (for example, cancer) may be characterized by one or more of the following: (1) a genetic mutation associated with development of the disease, disorder, and/or condition; (2) a genetic polymorphism associated with development of the disease, disorder, and/or condition; (3) increased and/or decreased expression and/or activity of a protein and/or nucleic acid associated with the disease, disorder, and/or condition; (4) habits and/or lifestyles associated with development of the disease, disorder, and/or condition; (5) a family history of the disease, disorder, and/or condition; and (6) exposure to and/or infection with a microbe associated with development of the disease, disorder, and/or condition. In some embodiments, an individual who is susceptible to a disease, disorder, and/or condition will develop the disease, disorder, and/or condition. In some embodiments, an individual who is susceptible to a disease, disorder, and/or condition will not develop the disease, disorder, and/or condition.

[0798] Sustained release: As used herein, the term “sustained release” refers to a pharmaceutical composition or compound release profile that conforms to a release rate over a specific period of time.

[0799] Synthetic: The term “synthetic” means produced, prepared, and/or manufactured by the hand of man. Synthesis of polynucleotides or polypeptides or other molecules of the present disclosure may be chemical or enzymatic.

[0800] Targeting: As used herein, “targeting” means the process of design and selection of nucleic acid sequence that will hybridize to a target nucleic acid and induce a desired effect.

[0801] Targeted Cells: As used herein, “targeted cells” refers to any one or more cells of interest. The cells may be found in vitro, in vivo, in situ or in the tissue or organ of an organism. The organism may be an animal, preferably a mammal, more preferably a human and most preferably a patient.

[0802] Therapeutic Agent: The term “therapeutic agent” refers to any agent that, when administered to a subject, has a therapeutic, diagnostic, and/or prophylactic effect and/or elicits a desired biological and/or pharmacological effect.

[0803] Therapeutically effective amount: As used herein, the term “therapeutically effective amount” means an amount of an agent to be delivered (e.g., nucleic acid, drug, therapeutic agent, diagnostic agent, prophylactic agent, etc.) that is sufficient, when administered to a subject suffering from or susceptible to an infection, disease, disorder, and/or condition, to treat, improve symptoms of, diagnose, prevent, and/or delay the onset of the infection, disease, disorder, and/or condition. In some embodiments, a therapeutically effective amount is provided in a single dose. In some embodiments, a therapeutically effective amount is administered in a dosage regimen comprising a plurality of doses Those skilled in the art will appreciate that in some embodiments, a unit dosage form may be considered to comprise a therapeutically effective amount of a particular agent or entity if it comprises an amount that is effective when administered as part of such a dosage regimen.

[0804] Therapeutically effective outcome: As used herein, the term “therapeutically effective outcome” means an outcome that is sufficient in a subject suffering from or susceptible to an infection, disease, disorder, and/or condition, to treat, improve symptoms of, diagnose, prevent, and/or delay the onset of the infection, disease, disorder, and/or condition.

[0805] Total daily dose: As used herein, a “total daily dose” is an amount given or prescribed in 24 hour period. It may be administered as a single unit dose.

[0806] Transfection: As used herein, the term “transfection” refers to methods to introduce exogenous nucleic acids into a cell. Methods of transfection include, but are not limited to, chemical methods, physical treatments and cationic lipids or mixtures.

[0807] Treating: As used herein, the term “treating” refers to partially or completely alleviating, ameliorating, improving, relieving, delaying onset of, inhibiting progression of, reducing severity of, and/or reducing incidence of one or more symptoms or features of a particular infection, disease, disorder, and/or condition. For example, “treating” cancer may refer to inhibiting survival, growth, and/or spread of a tumor. Treatment may be administered to a subject who does not exhibit signs of a disease, disorder, and/or condition and/or to a subject who exhibits only early signs of a disease, disorder, and/or condition for the purpose of decreasing the risk of developing pathology associated with the disease, disorder, and/or condition.

[0808] Unmodified: As used herein, “unmodified” refers to any substance, compound or molecule prior to being changed in any way. Unmodified may, but does not always, refer to the wild type or native form of a biomolecule. Molecules may undergo a series of modifications whereby each modified molecule may serve as the “unmodified” starting molecule for a subsequent modification.

[0809] Vector: As used herein, a “vector” is any molecule or moiety which transports, transduces or otherwise acts as a carrier of a heterologous molecule. Vectors of the present disclosure may be produced recombinantly and may be based on and/or may comprise adeno-associated virus (AAV) parent or reference sequence. Such parent or reference AAV sequences may serve as an original, second, third or subsequent sequence for engineering vectors. In non-limiting examples, such parent or reference AAV sequences may comprise any one or more of the following sequences: a polynucleotide sequence encoding a polypeptide or multi-polypeptide, which sequence may be wild-type or modified from wild-type and which sequence may encode full-length or partial sequence of a protein, protein domain, or one or more subunits of a protein; a polynucleotide comprising a modulatory or regulatory nucleic acid which sequence may be wild-type or modified from wild-type; and a transgene that may or may not be modified from wild-type sequence. These AAV sequences may serve as either the “donor” sequence of one or more codons (at the nucleic acid level) or amino acids (at the polypeptide level) or “acceptor” sequences of one or more codons (at the nucleic acid level) or amino acids (at the polypeptide level).

[0810] Viral genome: As used herein, a “viral genome” or “vector genome” is a polynucleotide comprising at least one inverted terminal repeat (ITR) and at least one encoded payload. A viral genome encodes at least one copy of the payload.

### VII. EXAMPLES

### Example 1. Production and Purification of AAV Particles

[0811] AAV particles described herein may be produced using methods known in the art, such as, for example, triple transfection or baculovirus mediated virus production. Any suitable permissive or packaging cell known in the art may be employed to produce the vectors. Mammalian cells are often preferred. Also preferred are trans-complementing packaging cell lines that provide functions deleted from a replication-defective helper virus, e.g., 293 cells or other E1a trans-complementing cells.

[0812] The gene cassette may contain some or all of the parvovirus (e.g., AAV) cap and rep genes. Preferably, however, some or all of the cap and rep functions are provided in trans by introducing a packaging vector(s) encoding the capsid and/or Rep proteins into the cell. Most preferably, the gene cassette does not encode the capsid or Rep proteins. Alternatively, a packaging cell line is used that is stably transformed to express the cap and/or rep genes.

[0813] Recombinant AAV virus particles are, in some cases, produced and purified from culture supernatants according to the procedure as described in US20160032254, the contents of which are incorporated by reference. Production may also involve methods known in the art including those using 293T cells, sf9 insect cells, triple transfection or any suitable production method.

[0814] In some cases, 293 cells are transfected with CaPO4 with plasmids required for production of AAV, i.e., AAV2 rep, an adenoviral helper construct and a ITR flanked transgene cassette. The AAV2 rep plasmid also contains the cap sequence of the particular virus being studied. Twenty-four hours after transfection, which occurs in serum containing DMEM, the medium is replaced with fresh medium with or without serum. Three (3) days after transfection, a sample is taken from the culture medium of the 293 adherent cells. Subsequently cells are scraped and transferred into a receptacle. After centrifugation to remove cellular pellet, a second sample is taken from the supernatant after scraping. Next, cell lysis is achieved by three consecutive freeze-thaw cycles (−80C to 37C). Cellular debris is removed and sample 3 is taken from the medium. The samples are quantified for AAV particles by DNase resistant genome titration by Taqman™ PCR. The total production yield from such a transfection is equal to the particle concentration from sample 3.

[0815] AAV particle titers are measured according to genome copy number (genome particles per milliliter). Genome particle concentrations are based on Taqman® PCR of the vector DNA as previously reported (Clark et al. (1999) Hum. Gene Ther., 10:1031-1039; and Veldwijk et al. (2002) Mol. Ther., 6:272-278).

### Example 2. Tissue Specific Expression

[0816] To evaluate the expression of various encoded payloads in tissues, a series of AAV particles carrying the encoded sequences driven by a panel of ubiquitous and tissue-specific promoters are made. These particles are administered to the specific tissue. e.g., systemically, via an appropriate route, e.g., a single intravenous injection and expression is monitored to determine the relative expression potential of the payload as well as of each promoter in this target tissue. Measurement of payload production is performed using standard techniques, for example by ELISA.

[0817] In some cases, the cytomegalovirus immediate early promoter (CMV), chimeric chicken-beta-actin (CAG), and ubiquitin C (UBC), CBA, H1, αMHC, cTnT, and CMV-MLC2k promoters which provide robust expression are used.

### Example 3. In Vivo Mouse Biodistribution and Transgene Expression Levels Following Intravenous Treatment with VOY101-GFP AAV Particles

[0818] An adeno-associated capsid variant (VOY101) was engineered for widespread gene transfer into the central nervous system. A viral genome comprising AAV2 wild-type Inverted Terminal Repeats (ITR), a synthetic promoter composed of CMV enhancer and chicken beta-actin promoter (CBA), an enhanced green fluorescent protein variant (eGFP) and a rabbit globin polyadenylation sequence was used to generate AAV particles, having a capsid serotype of either VOY101 or AAV9, by triple transfection into HEK293T cells. The ITR to ITR sequence of the viral genome is provided as SEQ ID NO: 1799.

[0819] The single-stranded AAV particles were purified and formulated in phosphate buffered saline (PBS) with 0.001% F-68, and then administered to adult C57Bl/6J mice at 6-7 weeks of age via lateral tail vein injection at ˜4 ml/kg, with a vector concentration of 5.0×10¹² vg/mL. The total dose was 2.0×10¹³ vector genomes (VG)/kg. A control group was treated with vehicle (PBS with 0.001% F-68).

[0820] Approximately 28 days following administration, several tissue samples were collected. Tissue samples allocated for GFP protein quantification or vector genome quantification were flash-frozen in liquid nitrogen. Tissue samples allocated for anti-GFP immunohistochemistry were post-fixed in 4% paraformaldehyde overnight. Analysis of the tissue samples by immuno-histochemical staining with an anti-GFP antibody and subsequent DAB substrate development showed that systemic injection with VOY101-GFP particles resulted in increased GFP levels throughout the brain and spinal cord as compared to the administered AAV9-GFP particles.

[0821] GFP protein levels were measured by ELISA and reported in ng GFP/mg of total protein and the results are shown in Table 13. Vector genome digital PCR quantification was performed using a probe set against the CMV enhancer region of the CBA promoter, normalized to host TFRC (transferrin receptor protein 1) and expressed in vector genome per diploid cell (VG/DC). The results are shown in Tables 14 and 15. In Tables 13, 14 and 15. “BLLQ” means below lower limit of quantification. For GFP protein levels, the lower limit of quantitation (LLOQ) was approximately 0.074 ng/mg protein. For VG levels, the LLOQ was approximately 0.03 VG/dc.

TABLE 13
GFP Expression in Mouse after Intravenous Injection

| AAV Serotype | GFP Expression (ng GFP/mg of total protein) | | | | |
|---|---|---|---|---|---|
| (Protein SEQ ID NO; | | Lumbar | Lumbar Dorsal | | |
| Nucleotide SEQ ID NO) | Striatum | Spinal Cord | Root Ganglia | Heart | Liver |
| VOY101 | 30.4 ± 3.7 | 111.2 ± 18.2 | 4.2 ± 2.3 | 261.8 ± 127.8 | 428.2 ± 239.2 |
| (SEQ ID NO: 1; | | | | | |
| SEQ ID NO: 1800) | | | | | |
| AAV9 | 0.5 ± 0.1 | 1.5 ± 0.4 | 14.3 ± 9.2 | 453.2 ± 138.1 | 2115.9 ± 951.0 |
| (SEQ ID NO: 136; | | | | | |
| SEQ ID NO: 135) | | | | | |
| Vehicle | BLLQ | BLLQ | 0.2 ± 0.5 | BLLQ | BLLQ |

TABLE 14
Vector Genome Distribution in Mouse after Intravenous Injection

AAV Serotype

| (Protein SEQ ID NO; | VG Distribution (VG/DC) | | | |
|---|---|---|---|---|
| Nucleotide | | | | Cerebellum |
| SEQ ID NO) | Striatum | Cortex | Brainstem | cortex |
| VOY101 | 27.8 ± 6.2 | 31.7 ± 8.2 | 33.5 ± 7.1 | 4.0 ± 1.2 |
| (SEQ ID NO: 1; | | | | |
| SEQ ID NO: 1800) | | | | |
| AAV9 | 0.3 ± 0.1 | 0.2 ± 0.1 | 0.5 ± 0.6 | 0.1 ± 0.1 |
| (SEQ ID NO: 136; | | | | |
| SEQ ID NO: 135) | | | | |
| Vehicle | BLLQ | BLLQ | BLLQ | BLLQ |

TABLE 15
Vector Genome Distribution in Mouse after Intravenous Injection

| | VG Distribution (VG/DC) | | | | |
|---|---|---|---|---|---|
| AAV Serotype | | Thoracic | Thoracic | | |
| (Protein SEQ ID NO; | Dentate | Spinal | Dorsal Root | | |
| Nucleotide SEQ ID NO) | nucleus | Cord | Ganglia | Heart | Liver |
| VOY101 | 34.0 ± 11.6 | 20.8 ± 2.4 | 2.1 ± 3.0 | 1.1 ± 0.6 | 17.7 ± 7.2 |
| (SEQ ID NO: 1; | | | | | |
| SEQ ID NO: 1800) | | | | | |
| AAV9 | 0.2 ± 0.1 | 0.2 ± 0.1 | 0.1 ± 0.02 | 1.0 ± 0.2 | 95.8 ± 19.7 |
| (SEQ ID NO: 136; | | | | | |
| SEQ ID NO: 135) | | | | | |
| Vehicle | BLLQ | BLLQ | BLLQ | BLLQ | BLLQ |

[0822] In mouse striatum, 28 days after intravenous injection of 2.0×10¹³ VG/kg, VOY101-GFP resulted in GFP levels 61-fold higher and vector genome levels 93-fold higher than AAV9-GFP. In mouse spinal cord, 28 days after intravenous injection of 2.0×10¹³ VG/kg, VOY101-GFP resulted in GFP levels 74-fold higher and vector genome levels 104-fold higher than AAV9-GFP. In mouse cortex, brainstem, cerebellum cortex and dentate nucleus, 28 days after intravenous injection of 2.0×10¹³ VG/kg, VOY101-GFP resulted in vector genome levels 159-fold, 67-fold, 40-fold and 170-fold, higher than AAV9-GFP, respectively. In mouse dorsal root ganglia, 28 days after intravenous injection of 2.0×10¹³ VG/kg, VOY101-GFP resulted in GFP levels 3.4-fold lower and vector genome levels 21-fold higher than AAV9-GFP. In mouse liver, 28 days after intravenous injection of 2.0×10¹³ VG/kg, VOY101-GFP resulted in GFP levels 4.9-fold lower and vector genome levels 5.4-fold lower than AAV9-GFP. In mouse heart, 28 days after intravenous injection of 2.0×10¹³ VG/kg. VOY101-GFP resulted in GFP levels 1.7-fold lower and vector genome levels 1.1-fold higher than AAV9-GFP.

### Example 4. In Vivo Biodistribution and Transgene Expression Levels Following Intravenous Administration of VOY101-FXN AAV Particles

[0823] A. Mouse in Vivo Biodistribution and Transgene Expression Levels Following Intravenous Treatment with VOY101-FX7V AAV Particles

[0824] Widespread gene transfer into the central nervous system, peripheral nervous system and heart was also observed when using a viral genome with Macaca fascicularis (cynomolgus monkey) frataxin transgene with and HA-tag (cFXN-HA). A viral genome comprising AAV2 wild-type ITRs, a synthetic promoter composed of CMV enhancer and chicken beta-actin promoter (CBA), Macaca fascicularis frataxin-HA (cFXN-HA) and a human growth hormone polyadenylation sequence was used to generate AAV particles, having a capsid serotype of either VOY101 or AAV9, by triple transfection into HEK293T cells. The ITR to ITR sequence of the viral genome is provided as SEQ ID NO: 1801.

[0825] The single-stranded AAV particles were purified and formulated in phosphate buffered saline (PBS) with 0.001% F-68, and then administered to adult C57B/6J mice at 9 weeks of age via lateral tail vein injection ˜4 ml/kg, with a vector concentration of 1.0×10¹² vg/mL. The total dose was 4.2×10¹² VG/kg. A control group was treated with vehicle (PBS with 0.001% F-68).

[0826] Seven days following AAV particle or vehicle administration, several tissue samples were collected. Tissue samples were flash-frozen in liquid nitrogen. Vector genome digital PCR quantification was performed using a probe set against the CMV enhancer region of the CBA promoter, normalized to host TFRC, and expressed in vector genome per diploid cell (VG/DC), cFXN-HA protein levels were measured by ELISA and reported in ng cFXN-HA/mg of total protein, cFXN-HA protein levels and vector genome distribution are shown in Tables 16 and 17, respectively. In Tables 16 and 17, “BLLQ” means below lower limit of quantification. For cFXN-HA protein levels, the LLOQ was approximately 0.123 ng/mg protein. For VG levels, the LLOQ was approximately 0.03 VG/dc.

TABLE 16
cFXN Expression in Monse after Intravenous Injection

| AAV Serotype | FXN Expression (ng FXN/mg of total protein) | | | | | |
|---|---|---|---|---|---|---|
| (Protein SEQ ID NO; | | | Lumbar | | | |
| Nucleotide | | Lumbar | Dorsal Root | Trigeminal | | |
| SEQ ID NO) | Cortex | Spinal Cord | Ganglia | ganglion | Heart | Liver |
| VOY101 | 23.4 ± 13.8 | 64.1 ± 10.2 | 11.2 ± 2.4 | 6.0 ± 3.1 | 17.8 ± 17.1 | 69.2 ± 51.1 |
| (SEQ ID NO: 1; | | | | | | |
| SEQ ID NO: 1800) | | | | | | |
| AAV9 | BLLQ | BLLQ | BLLQ | 0.4 ± 0.5 | 1.9 ± 3.1 | 327.8 ± 171.5 |
| (SEQ ID NO: 136; | | | | | | |
| SEQ ID NO: 135) | | | | | | |
| Vehicle | BLLQ | BLLQ | BLLQ | BLLQ | BLLQ | BLLQ |

TABLE 17
Vector Genome Distribution in Mouse after intravenous injection

| AAV Serotype | VG Distribution (VG/DC) | | | | | |
|---|---|---|---|---|---|---|
| (Protein SEQ ID NO; | | | Thoracic | | | |
| Nucleotide | | Lumbar | Dorsal Root | Trigeminal | | |
| SEQ ID NO) | Cortex | Spinal Cord | Ganglia | ganglion | Heart | Liver |
| VOY101 | 14.85 ± 3.58 | 23.51 ± 1.96 | 6.49 ± 3.19 | 2.45 ± 1.27 | 0.46 ± 0.13 | 8.74 ± 5.98 |
| (SEQ ID NO: 1; | | | | | | |
| SEQ ID NO: 1800) | | | | | | |
| AAV9 | 0.09 ± 0.01 | 0.07 ± 0.02 | 0.55 ± 0.40 | 0.04 ± 0.02 | 0.17 ± 0.05 | 56.74 ± 30.60 |
| (SEQ ID NO: 136; | | | | | | |
| SEQ ID NO: 135) | | | | | | |
| Vehicle | BLLQ | BLLQ | BLLQ | BLLQ | BLLQ | BLLQ |

[0827] In mouse cortex, seven days after intravenous injection of 4.2×10¹² vg/kg, VOY101-cFXN-HA resulted in 165-fold higher vector genome levels and substantially higher cFXN-HA expression than AAV9-cFXN-HA. (AAV9 cFXN-HA expression was below the lower limit of quantitation.) In mouse lumbar spinal cord, seven days after intravenous injection of 4.2×10¹² vg/kg, VOY101-cFXN-HA resulted in 336-fold higher vector genome levels and substantially higher cFXN-HA protein expression than AAV9-cFXN-HA.

[0828] In dorsal root ganglia, seven days after intravenous injection of 4.2×10¹² vg/kg, VOY101-cFXN-HA resulted in 12-fold higher vector genome levels and substantially higher cFXN-HA protein expression than AAV9-cFXN-HA. (AAV9 cFXN-HA expression was below the lower limit of quantitation.) In trigeminal ganglion, seven days after intravenous injection of 4.2×10¹² vg/kg, VOY101-cFXN-HA resulted in 61-fold higher vector genome and 15-fold higher cFXN-HA protein expression than AAV9-cFXN-HA.

[0829] In heart, seven days after intravenous injection of 4.2×10¹² VG/kg, VOY101-cFXN-HA resulted in 2.7-fold higher vector genome and 9.4-fold higher cFXN-HA protein expression than AAV9-cFXN-HA. In liver, seven days after intravenous injection of 4.2×10¹² VG/kg, VOY101-FXN-HA resulted in 6.5-fold lower vector genome and 4.7-fold lower cFXN-HA protein expression than AAV9-cFXN-HA.

B. In Vivo Study in Non-Human Primate on Biodistribution and Levels of cFXN-HA Expression after IV Treatment with VOY01-FXN-HA AAV Particles

[0830] A study in cynomolgus monkeys (Macaca fascicularis) was conducted to evaluate cFXN-HA expression within the CNS after IV dosing of VOY101-cFXN-HA.

[0831] A viral genome comprising HA-tagged cynomolgus frataxin (cFXN-HA) was engineered into a single stranded expression vector. A viral genome comprising AAV2 wild-type ITRs, a synthetic promoter composed of CMV enhancer and chicken beta-actin promoter (CBA), Macaca fascicularis frataxin (cFXN) with a 3′ HA-tag and a human growth hormone polyadenylation sequence was used to generate AAV particles, having a capsid serotype of VOY101 or AAV9, by triple transfection into HEK293T cells. The ITR to ITR sequence of the viral genome is provided as SEQ ID NO: 1801.

[0832] The single-stranded AAV particles (VOY101-cFXN-HA, AAV9-cFXN-HA) were purified and formulated in phosphate buffered saline (PBS) with 0.001% F-68, and then administered to non-human primate (Macaca fascicularis) via saphenous vein injection at 5 mL/kg. For VOY101-cFXN-HA, the vector concentration was 1.34×10¹² vg/mL and the total dose was 6.7×10¹² VG/kg. For AAV9-cFXN-HA, the total dose was 2×10¹³ VG/kg.

[0833] Approximately 28 days following AAV particle administration, several tissue samples were collected. Tissue samples allocated for cFXN-HA protein quantification or vector genome quantification were snap-frozen. Tissue samples allocated for anti-HA immunohistochemistry were post-fixed in 4% paraformaldehyde for 12 to 72 hours at 2-8C. Tissue sections (20 μm thickness) were stained with a rabbit monoclonal antibody to HA tag (1:100 or 1:2000), followed by a goat-anti-rabbit IgG biotinylated secondary antibody (1:1000), and then developed with DAB plus nickel.

[0834] cFXN-HA staining was observed in multiple CNS regions after IV dosing of VOY101-cFXN. These regions include but are not limited to, the spinal cord (cervical, thoracic and lumbar segments), brainstem nuclei, cerebellum (including cerebellar dentate nucleus), thalamus, caudate nucleus, and cerebral cortex. Homogeneous HA staining was observed along the entire rostral-caudal extent of the spinal cord, particularly in ventral horn motor neurons, after IV dosing of VOY101-cFXN-HA at 6.7×10¹² VG/kg. The spinal cord and especially ventral horn motor neurons were labeled to a greater degree with VOY101-cFXN-HA than with AAV9-cFXN-HA, despite the 3-fold lower dose of VOY101-cFXN-HA. Vehicle-treated control non-human primates exhibited essentially no detectable background staining for HA.

[0835] HA staining in the lumbar ventral horn, including motor neurons, was similar after IV VOY101-cFXN-HA (6.7×10¹² VG/kg) compared with IT administration of a similar dose of AAVrh10-FXN-HA.

[0836] Vector genome digital PCR quantification was performed using a probe set against the CMV enhancer region of the CBA promoter, normalized to host RnaseP and expressed in vector genome per diploid cell (VG/DC), cFXN-HA protein levels were measured by ELISA, cFXN-HA protein levels (in ng cFXN-HA/mg of total protein) and vector genome distribution (VG/DC) are shown in Table 18. In Table 18, “BLLQ” means below lower limit of quantification and “NA” means not analyzed. The LLOQ was approximately 0.123 ng/mg protein.

TABLE 18
cFXN-HA Expression in NHP after Intravenous Injection

| | NHP2001 | |
|---|---|---|
| | cFXN-HA | VG |
| Tissue | (ng/mg protein) | (VG/DC) |
| Frontal Cortex | BLLQ | 0.24 |
| Striatum | BLLQ | 0.04 |
| Brainstem | 112.9 | 0.50 |
| Cerebellum | BLLQ | 0.02 |
| Cervical Spinal Cord | 49.2 | 0.14 |
| Thoracic Spinal Cord | 14.1 | 0.15 |
| Lumbar Spinal Cord | 32.4 | NA |
| Cervical Dorsal Root Ganglia | 195.4 | 0.71 |
| Thoracic Dorsal Root Ganglia | 88.2 | 1.18 |
| Lumbar/Sacral Dorsal Root Ganglia | 87.4 | 1.86 |
| Heart Ventricle | 212.4 | 9.1 |
| Heart Atrium | 358.0 | 7.23 |
| Liver | 4.48 | 224.83 |
| Kidney | BLLQ | 0.93 |
| Lung | BLLQ | 0.58 |
| Soleus | 1.1 | 0.44 |
| Jejunum | 2.0 | 1.86 |
| Spleen | BLLQ | 14.65 |

[0837] These results show that in non-human primates (NHPs) 28 days after intravenous injection of 6.7×10¹² VG/kg, VOY101-cFXN-HA resulted in brain transduction. Significant levels of cFXN-HA protein were detected in many CNS regions including the spinal cord (cervical, thoracic and lumbar segments) and brainstem. Significant levels of vector genomes were detected in many CNS regions including the spinal cord (cervical and thoracic segments), brainstem, and cortex, after IV dosing.

C. Non-Human Primate In Vivo Biodistribution and Transgene Expression Levels after IV Administration of VOY201-FXN-HA AAV Particles

[0838] A dose-response study in cynomolgus monkeys (Macaca fascicularis) was conducted to evaluate cFXN expression within the CNS after IV dosing of VOY201-cFXN-HA.

[0839] A viral genome comprising HA-tagged cynomolgus frataxin (cFXN-HA) was engineered into a single stranded expression vector. A viral genome comprising AAV2 wild-type ITRs, a synthetic promoter composed of CMV enhancer and chicken beta-actin promoter (CBA), Macaca fascicularis frataxin (cFXN) with a HA-tag, triple repeat of a miR-122 target sequence (to reduce transgene liver expression), and a human growth hormone polyadenylation sequence was used to generate AAV particles, having a capsid serotype of VOY201, by triple transfection into HEK293T cells. The ITR to ITR sequence of the viral genome is provided as SEQ ID NO: 1802.

[0840] The single-stranded AAV particles were purified and formulated in phosphate buffered saline (PBS) with 0.001% F-68, and then administered to non-human primate (Macaca fascicularis) via saphenous vein injection at 5 mL/kg, with a vector concentration of 1.54×10¹¹ to 4.75×10¹² vg/mL. Animals were dosed at 6.32×10¹¹, 2.0×10¹², or 2.0×10¹³ VG/kg.

[0841] Approximately 28 days following AAV particle administration, several tissue samples were collected. Tissue samples allocated for cFXN-HA protein quantification or vector genome quantification were snap frozen. Tissue samples allocated for anti-HA immunohistochemistry were post-fixed in 4% paraformaldehyde for 12 to 72 hours at 2-8° C. For single labeling, tissue sections (20 μm thickness) were stained with a rabbit monoclonal antibody to HA tag (1:1000 or 1:2000), followed by a goat-anti-rabbit IgG biotinylated secondary antibody (1:1000), and then developed with DAB plus nickel.

[0842] HA staining was observed in multiple CNS regions after IV dosing of VOY201-cFXN-HA at 2×10¹³ vg/kg. These regions include but are not limited to, the spinal cord (cervical, thoracic and lumbar segments), cerebellum (including dentate nucleus), thalamus, striatum, substantia nigra, and sensory and motor cortex. Furthermore, HA staining showed transduction of large numbers of neurons in multiple CNS regions, including those of neuronal morphology in the substantia nigra, dentate nucleus and thalamus. In addition, cells of neuronal morphology in the spinal cord, motor and sensory cortices, and striatum were HA-immunoreactive.

[0843] Double labeling for the HA tag and the neuronal marker NeuN was carried out using a chromogenic method. Tissue sections (20 μm thickness) were stained with a rabbit monoclonal antibody to HA tag (1:1000), followed by a goat-anti-rabbit IgG biotinylated secondary antibody (1:1000), and then developed with DAB (without nickel). The sections were then stained with a mouse monoclonal to NeuN second primary antibody, followed by a goat-anti-mouse IgG biotinylated secondary antibody. The NeuN signal was then detected with a green chromogen.

[0844] Multiple HA+ cells were double-labeled with the neuronal marker NeuN. These results demonstrate that neurons of the cerebellar dentate nucleus were labeled for the HA tag after intravenous injection of VOY201-cFXN-HA at 2×10¹³ VG/kg. Therefore, after an intravenous dose of 2×10¹³ vg/kg in cynomolgus monkeys, neurons of the cerebellar dentate nucleus are transduced and express the transgene.

[0845] Expression of the HA tag in lumbar dorsal root ganglia was present in both large (>40 um) and small sensory neurons, with the labeling increasing in a dose-dependent manner with IV injection of VOY201-cFXN-HA at 6.32×10¹¹, 2.0×10¹², or 2.0×10¹³ VG/kg.

[0846] Vector genome digital PCR quantification was performed using a probe set against the CMV enhancer region of the CBA promoter, normalized to host RnaseP and expressed in vector genome per diploid cell (VG/DC), cFXN-HA protein levels were measured by ELISA, cFXN-HA protein levels (in ng cFXN-HA/mg of total protein) and vector genome distribution (VG/DC) for the VOY201 capsid serotype are shown in Table 19. In Table 19, “BLLQ” means below lower limit of quantification and “NA” means not analyzed. The LLOQ for cFXN-HA protein was approximately 0.123 ng/mg. The LLOQ for the vector genome assay was approximately 0.2 VG/DC.

TABLE 19
cFXN-HA Expression in NHP after Intravenous Injection of VOY201-cFXX- HA

| | 6.3 × 10¹¹ VG/kg | | 2 × 10¹² VG/kg | | 2 × 10¹³ VG/kg | |
|---|---|---|---|---|---|---|
| | NHP003 | | NHP005 | | NHP007 | |
| | NHP004 | | NHP009 | | NHP008 | |
| | cFXN-HA | | cFXN-HA | | cFXN-HA | |
| | (ng/mg | VG | (ng/mg | VG | (ng/mg | VG |
| Tissue | prot.) | (VG/DC) | prot.) | (VG/DC) | prot.) | (VG/DC) |
| Frontal Cortex | NA | BLLQ | NA | BLLQ | NA | 0.27 |
| | NA | BLLQ | NA | BLLQ | NA | 0.54 |
| Striatum | BLLQ | BLLQ | BLLQ | BLLQ | BLLQ | 0.27 |
| | BLLQ | BLLQ | BLLQ | BLLQ | BLLQ | 0.81 |
| Brainstem | BLLQ | BLLQ | BLLQ | BLLQ | 29.4 | 0.73 |
| | BLLQ | BLLQ | BLLQ | BLLQ | BLLQ | 0.96 |
| Cerebellum | BLLQ | BLLQ | BLLQ | BLLQ | BLLQ | 0.03 |
| | BLLQ | BLLQ | BLLQ | BLLQ | 5.1 | 0.22 |
| Cervical | BLLQ | BLLQ | BLLQ | BLLQ | 63.7 | 0.36 |
| Spinal Cord | BLLQ | BLLQ | BLLQ | BLLQ | 85.0 | 0.12 |
| Thoracic | BLLQ | BLLQ | BLLQ | BLLQ | 41.2 | 0.32 |
| Spinal Cord | BLLQ | BLLQ | BLLQ | BLLQ | 44.5 | 0.32 |
| Lumbar Spinal | BLLQ | BLLQ | BLLQ | BLLQ | 43.9 | 0.37 |
| Cord | BLLQ | BLLQ | BLLQ | BLLQ | 49.2 | 0.53 |
| Cervical DRG | BLLQ | BLLQ | 9.29 | BLLQ | 421.5 | 2.41 |
| | 2.8 | BLLQ | BLLQ | BLLQ | 509.9 | 1.87 |
| Thoracic DRG | BLLQ | BLLQ | 6.1 | BLLQ | 227.2 | 2.92 |
| | BLLQ | BLLQ | BLLQ | BLLQ | 866.4 | 2.52 |
| Lumbar/Sacral | BLLQ | BLLQ | 4.9 | BLLQ | 122.2 | 3.68 |
| DRG | BLLQ | BLLQ | BLLQ | BLLQ | 138.1 | 1.63 |
| Heart | BLLQ | BLLQ | 22.9 | 0.5 | 1034.5 | 15.3 |
| Ventricle | 6.0 | 0.2 | BLLQ | 0.4 | 185.6 | 7.7 |
| Heart Atrium | 7.3 | BLLQ | 60.5 | 0.97 | 650.5 | 26.3 |
| | 5.2 | BLLQ | BLLQ | 0.13 | 810.0 | 26.6 |
| Liver | BLLQ | 0.4 | BLLQ | 30.4 | BLLQ | 444.1 |
| | BLLQ | 7.9 | BLLQ | 74.8 | BLLQ | 284.4 |
| Kidney | BLLQ | BLLQ | BLLQ | 0.3 | 6.4 | 6.3 |
| | BLLQ | BLLQ | BLLQ | BLLQ | 2.8 | 2.5 |
| Lung | BLLQ | NA | BLLQ | NA | 0.9 | 3.3 |
| | BLLQ | NA | BLLQ | NA | BLLQ | 3.6 |
| Soleus | BLLQ | NA | BLLQ | NA | 69.9 | 13.4 |
| | BLLQ | NA | BLLQ | NA | 12.6 | 6.7 |
| Jejunum | BLLQ | NA | BLLQ | NA | BLLQ | 0.6 |
| | BLLQ | NA | BLLQ | NA | BLLQ | 0.3 |
| Spleen | BLLQ | 1.3 | BLLQ | 4.3 | BLLQ | 4.4 |
| | BLLQ | 1.2 | BLLQ | 4.6 | 2.1 | 2.3 |

[0847] In summary, in non-human primates (NHPs) 28 days after intravenous injection of VOY201-cFXN-HA, significant levels of cFXN-HA protein were detected in many CNS regions including the spinal cord (cervical, toracic and lumbar segments), brainstem, and cerebellum. Significant levels of vector genomes were detected in many CNS regions including the spinal cord (cervical, thoracic and lumbar segments), striatum brainstem, cerebellum and frontal cortex after IV dosing. Substantial gene transfer to the NHP CNS was observed, including, for example, regions such as spinal cord, brain stem, sensory cortex, motor cortex, cerebellum, cerebellar dentate nucleus, thalamus, striatum, and substantia nigra with cells of neuronal morphology in these regions exhibiting transgene expression. In addition, the dorsal root ganglia and the heart showed dose-dependent transgene expression, with sensory neurons of the dorsal root ganglia exhibiting transduction.

D. Non-Human Primate Dose-Dependency of Biodistribution and Transgene Expression Levels after IV Administration of VOY101-FXN-HA AAV Particles

[0848] A study in cynomolgus monkeys (Macaca fascicularis) was conducted to evaluate cFXN expression within the CNS after IV administration of two different dose levels of single stranded VOY101-cFXN-HA or control AAV9-cFXN-HA at a single dose level.

[0849] A viral genome comprising HA-tagged cynomolgus frataxin (cFXN-HA) was engineered into a single stranded expression vector. A viral genome comprising AAV2 wild-type ITRs, a synthetic promoter composed of CMV enhancer and chicken beta-actin promoter (CBA), Macaca fascicularis frataxin (cFXN) with an HA-tag and a human growth hormone polyadenylation sequence was used to generate AAV particles, having a capsid serotype of VOY101 or AAV9. The ITR to ITR sequence of the viral genome is provided as SEQ ID NO: 1801.

[0850] The single-stranded AAV particles were purified and formulated in phosphate buffered saline (PBS) with 0.001% F-68, and then administered to non-human primate (Macaca fascicularis) via saphenous vein injection at 5 ml/kg, with a total dose of 6.7×10¹³ VG/kg or 4.89×10¹³ VG/kg VOY101-cFXN-HA. A vehicle negative control group was also evaluated.

[0851] Approximately 28 days following AAV particle administration, several tissue samples were collected. Tissue samples allocated for cFXN-HA protein quantification or vector genome quantification were snap-frozen. Tissue samples allocated for anti-HA immunohistochemistry were post-fixed in 4% paraformaldehyde for 12 to 72 hours at 2-8° C. Tissue sections (20 μm thickness) were stained with a rabbit monoclonal antibody to HA tag (1:1000 or 1:2000), followed by a goat-anti-rabbit IgG biotinylated secondary antibody (1:1000), and then developed with DAB plus nickel.

[0852] Frataxin protein levels were measured by ELISA and reported in ng FXN/mg of total protein; the results are shown in Table 20. Vector genome digital PCR quantification was performed using a probe set against the CMV enhancer region of the CBA promoter, normalized to host RNaseP, and expressed in vector genome per diploid cell (VG/DC); the results are shown in Table 20.

TABLE 20
Vector Genome Distribution and cFXN-HA Expression
in NHP after Intravenous Injection of AAV Particles

| | 6.7 × 10¹² VG/kg | | 4.89 × 10¹³ VG/kg | |
|---|---|---|---|---|
| | VOY101 | | VOY101 | |
| | NHP2001 | | NHP3001 | |
| | NHP2002 | | NHP3002 | |
| | NHP2003 | | NHP3003 | |
| | cFXN-HA | | cFXN-HA | |
| | (ng/mg | VG | (ng/mg | VG |
| Tissue | prot.) | (VG/DC) | prot.) | (VG/DC) |
| Motor Cortex | BLLQ | 0.29 | BLLQ | 1.51 |
| | BLLQ | 0.10 | BLLQ | 1.79 |
| | BLLQ | 0.03 | BLLQ | 2.32 |
| Sensorimotor | BLLQ | 0.17 | BLLQ | 0.67 |
| Cortex | BLLQ | 0.07 | BLLQ | 1.46 |
| | BLLQ | 0.06 | BLLQ | 0.75 |
| Striatum | BLLQ | 0.09 | BLLQ | 0.61 |
| | BLLQ | 0.03 | BLLQ | 1.01 |
| | BLLQ | 0.04 | BLLQ | 0.65 |
| Brainstem | 1.80 | 0.21 | 211.85 | 0.58 |
| | BLLQ | 0.06 | 18.05 | 2.33 |
| | BLLQ | 0.07 | 76.27 | 1.10 |
| Cerebellum cortex | BLLQ | 0.02 | BLLQ | 0.08 |
| | BLLQ | BLLQ | 1.67 | 0.08 |
| | BLLQ | BLLQ | 4.28 | 0.07 |
| Cervical Spinal | 15.25 | 0.30 | 172.72 | 1.12 |
| Cord | 15.45 | 0.06 | 87.42 | 1.36 |
| | 4.31 | 0.07 | 97.47 | 1.84 |
| Thoracic Spinal | NA | NA | NA | 1.09 |
| Cord | NA | NA | NA | 0.76 |
| | NA | NA | NA | 1.77 |
| Lumbar Spinal | 13.25 | 0.28 | 162.89 | 1.68 |
| Cord | 17.06 | 0.13 | 59.19 | 0.83 |
| | 8.85 | 0.06 | 90.71 | 0.94 |
| Cervical Dorsal | 90.27 | 0.1 | 1256.69 | 0.69 |
| Root Ganglia | 110.87 | 0.09 | 1319.74 | 0.29 |
| | 56.73 | 0.05 | 1472.33 | 0.59 |
| Thoracic Dorsal | 30.90 | 0.11 | 1432.87 | 2.35 |
| Root Ganglia | 49.38 | 0.10 | 341.00 | 1.11 |
| | 18.86 | BLLQ | 367.13 | 0.77 |
| Lumbar/Sacral | 37.93 | 0.25 | 1808.81 | 1.70 |
| Dorsal Root | 59.02 | 0.19 | 224.99 | 1.73 |
| Ganglia | 29.31 | 0.07 | 534.13 | 1.31 |
| Heart Ventricle | 57.64 | 1.10 | 555.55 | 8.59 |
| | 90.78 | 0.94 | 394.04 | 6.76 |
| | 54.47 | 0.77 | 353.98 | 12.84 |
| Heart Atrium | 196.06 | 1.34 | 754.14 | 8.76 |
| | 81.59 | 4.81 | 271.92 | 10.02 |
| | 30.25 | 0.91 | 112.91 | 10.10 |
| Liver | 2.25 | 204.98 | 16.70 | 1094.89 |
| | 2.99 | 49.37 | 65.53 | 1638.33 |
| | 3.10 | 99.07 | 51.40 | 685.10 |
| Kidney | BLLQ | 0.56 | 1.36 | 6.44 |
| | BLLQ | 0.95 | 7.91 | 3.84 |
| | BLLQ | 1.01 | 3.34 | 2.78 |
| Soleus | 12.56 | 0.85 | 203.70 | 5.86 |
| | 1.10 | 0.34 | 262.47 | 4.24 |
| | 2.46 | 0.26 | 347.42 | 3.71 |
| Jejunum | BLLQ | 0.03 | BLLQ | 0.99 |
| | BLLQ | 0.24 | BLLQ | 0.78 |
| | BLLQ | 0.18 | BLLQ | 2.10 |
| Spleen | BLLQ | 6.62 | BLLQ | 15.44 |
| | BLLQ | 7.60 | BLLQ | 8.03 |
| | BLLQ | 10.10 | BLLQ | 48.11 |
| Sympathetic | 161.75 | 0.65 | 996.59 | 8.08 |
| thoracic Chain | 108.70 | 0.63 | 115.45 | 0.62 |
| Ganglia | 101.23 | 0.52 | 215.32 | 2.51 |
| Adrenal | 5.93 | 0.58 | 53.25 | 7.14 |
| | 56.26 | 0.88 | 84.33 | 3.34 |
| | 22.20 | 0.32 | 29.95 | 11.39 |

[0853] These results show that in non-human primates (NHPs) 28 days after intravenous injection of 6.7×10¹² VG/kg or 4.89×10¹³ VG/kg VOY101-cFXN-HA resulted in brain transduction. Significant levels of cFXN-HA protein were detected in many CNS regions including but not limited to the spinal cord (cervical and lumbar segments), cerebellum and brainstem. Significant levels of vector genomes were detected in many CNS regions including, for example, the spinal cord (cervical and thoracic segments), brainstem, striatum, cerebellum and cortex, after IV dosing. Substantially more cFXN-HA was observed in brain regions including but not limited to cerebellum, brainstem and spinal cord in VOY101-cFXN-HA-treated NHPs compared to AAV9-cFXN-HA, both IV at 4.89×10¹³ VG/kg. In the DRGs, VOY101-cFXN-HA-treated NHPs displayed substantially higher cFXN-HA compared to AAV9-cFXN-HA-treated animals, both IV at 4.89×10¹³ VG/kg. In general, VOY101-cFXN-HA-treated NHPs showed dose-dependency of brain and DRG cFXN-HA levels comparing 6.7×10¹³ VG/kg to 4.89×10¹³ VG/kg dosed animals.

[0854] NHPs treated with IV VOY101-cFXN-HA displayed substantial vector genome transfer to the brain and DRGs at both doses and in a dose-dependent manner. High vector genome levels were found in many brain regions, including but not limited to cortex, striatum, brainstem, cerebellum, and spinal cord. In an exemplar study, one L6 lumbar DRG of an NHP treated with 6.7×10¹² VG/kg of VOY101-cFXN-HA was assessed by HA-immunohistochemistry with eosin counterstain. The tissue was extracted as noted previously, at 28 days after IV administration of VOY101-cFXN-HA. Analysis of the neurons of the DRG indicated that all (100%) large neurons (≥40 μm diameter) were also HA+, though intensity varied across the 165 neurons quantified. Approximately 74% of the counted neurons showed high intensity HA staining (i.e., frataxin expression).

[0855] RT-qPCR quantification of frataxin transgene mRNA in motor cortex and spinal cord was performed using an assay against exonic sequences of the human beta globin (hBG) intron/exon boundaries, normalized to the geometric mean of alanyl-tRNA synthetase (AARS), TATA-box binding protein (TBP) and X-prolyl aminopeptidase (XPNPEP1), and expressed in fold expression over the AAV9 group. The results are shown in Table 21. These results demonstrate 5-fold higher FXN mRNA in motor cortex with VOY101 vs AAV9 at this dose. These results also demonstrate 3.8-fold higher FXN mRNA in spinal cord with VOY101 vs AAV9 at this dose.

TABLE 21
cFXN mRNA Fold Expression Over AAV9 in NHP after
Intravenous Injection of AAV particles

| | 4.89 × 10¹³ VG/kg | 4.89 × 10¹³ VG/kg |
|---|---|---|
| | VOY101-cFXN-HA | AAV9-cFXN-HA |
| | NHP3001 | NHP1001 |
| | NHP3002 | NHP1002 |
| Tissue | NHP3003 | NHP1003 |
| Motor Cortex | 3.46 | 0.38 |
| Punch | 4.43 | 1.62 |
| | 10.18 | 1.62 |
| Thoracic T7 | 5.19 | 0.39 |
| Spinal Cord | 1.63 | 0.89 |
| Cross-section | 8.95 | 2.84 |

[0856] Significant HA staining was observed in cells along the entire rostral-caudal extent of the spinal cord, particularly in ventral horn motor neurons after IV dosing of 4.89-10 VG/kg of VOY101-cFXN-HA or AAV9-cFXN-HA. At both doses of VOY101-cFXN-HA, abundant HA staining was observed in segment T12 of the spinal cord, including within the dorsal nucleus or Clark's column. Numerous HA+ cells including those with neuronal morphology were observed in brain regions of animals receiving a dose of 4.89×10¹³ VG/kg of VOY101-cFXN-HA. These regions include, for example, the motor and sensory cortices, the brainstem including the olivary nucleus, hippocampus, the substantia nigra, thalamus, the lateral geniculate nucleus, and the deep cerebellar nuclei including the dentate nucleus. Vehicle-treated controls exhibited essentially no detectable or very low background staining.

[0857] In the brain of NHPs treated intravenously with AAV9-cFXN-HA at 4.89×10¹³ VG/kg, HA-labeling was less pronounced compared to NHPs treated with VOY101-cFXN-HA at 4.89×10¹³ VG/kg.

[0858] Robust HA staining was observed in the cervical, thoracic, and lumbar dorsal root ganglia for NHP treated intravenously with VOY101-cFXN-HA or AAV9-cFXN-HA at 4.89×10¹³ VG/kg. Vehicle-treated control exhibited essentially no detectable or very low background staining.

[0859] The distribution of vector genomes to motor neurons was assessed using a Basescope singleplex in situ hybridization (ISH) assay in spinal cord tissue from NHPs treated intravenously with VOY101-cFXN-HA or AAV9-cFXN-HA at 4.89×10¹³ VG/kg. The fixed spinal cord samples were paraffin-embedded and sectioned (5 μm thickness). In situ hybridization was conducted on cross sections of the cervical spinal cord to label vector genome DNA. All ventral horn motor neurons (identified by morphology) with identifiable nuclei were scored to evaluate vector genome levels based on the number of dots per nucleus. Scores for vector genome levels were defined as below:

[0860] Score (Dots counted per nucleus)
[0861] 1: 1 dot/nucleus
[0862] 2: 2-3 dots/nucleus
[0863] 3: 4-10 dots/nucleus
[0864] 4: >10 dots/nucleus

[0865] Scores were obtained for all processed samples. The number of motor neurons per score was determined for AAV9 and VOY101 groups and is shown in Table 22. These data observe pronounced (Scores 3 and 4) nuclear VG labeling in 3.2-fold more motor neurons with VOY101 vs AAV9 at this dose.

TABLE 22
Vector Genome Distribution to Spinal Cord Motor Neurons
Assessed by ISH After Intravenous Injection of VOY101-cFXN-HA
or AAV9-cFXN-HA at 4.9 × 10¹³ VG/kg

| | | Average Number of Motor Neurons | | | |
|---|---|---|---|---|---|
| Group | Animal ID | Score 1 | Score 2 | Score 3 | Score 4 |
| AAV9 | NHP1001 | 6 | 4 | 0 | 0 |
| | NHP1002 | 9 | 2.5 | 0 | 1.5 |
| | NHP1003 | 7 | 5.5 | 0.5 | 1 |
| | AVERAGE | 7.33 | 4 | 0.17 | 0.83 |
| VOY101 | NHP3001 | 9.5 | 6.5 | 1 | 1 |
| | NHP3002 | 10 | 5 | 2 | 0.5 |
| | NHP3003 | 8 | 3.5 | 1.5 | 3.5 |
| | AVERAGE | 9.17 | 5 | 1.50 | 1.67 |

[0866] For all scores, VOY101 treated animals showed higher vector genome distribution to cervical spinal cord motor neurons compared to AAV9 treated animals.

E. Non-Human Primate Tolerability Assessment of Treatment with AAV9. VOY101 and VOY201 AAV Particles

[0867] A series of studies in cynomolgus monkeys (Macaca fascicularis) was conducted to evaluate tolerability of AAV9, VOY101 or VOY201 AAV particles carrying different payload transgenes after IV administration of single doses varying from 2×10¹² VG/kg to 1.2×10¹⁴ VG/kg. See Table 23. All animals were pre-screened to display low neutralizing anti-capsid antibody serum titer. Male and female NHP were used according to Table 23.

[0868] A viral genome comprising HA-tagged cynomolgus frataxin (cFXN-HA) was engineered into a single stranded expression vector. A viral genome comprising AAV2 wild-type ITRs, a synthetic promoter composed of CMV enhancer and chicken beta-actin promoter (CBA), Macaca fascicularis frataxin (cFXN) with an HA-tag and a human growth hormone polyadenylation sequence was used to generate AAV particles, having a capsid serotype of VOY101 or VOY201. The ITR to ITR sequence of the viral genome is provided as SEQ ID NO: 1801.

[0869] A viral genome comprising HA-tagged cynomolgus frataxin (cFXN-HA) was engineered into a single stranded expression vector. A viral genome comprising AAV2 wild-type ITRs, a synthetic promoter composed of CMV enhancer and chicken beta-actin promoter (CBA), Macaca fascicularis frataxin (cFXN) with a HA-tag, triple repeat of a miR-122 target sequence (to reduce transgene liver expression), and a human growth hormone polyadenylation sequence was used to generate AAV particles, having a capsid serotype of VOY201, by triple transfection into HEK293T cells. The ITR to ITR sequence of the viral genome is provided as SEQ ID NO: 1802.

[0870] A viral genome comprising a micro-RNA targeting human superoxide dismutase 1 (miRSOD1) was engineered into a self-complementary expression vector. A viral genome comprising AAV2 wild-type ITRs, a synthetic H1 promoter, a micro-RNA targeting hSOD1, and a rabbit beta globin polyadenylation sequence was used to generate AAV particles, having a capsid serotype of VOY101, by triple transfection into HEK293T cells. The ITR to ITR sequence of the viral genome is provided as SEQ ID NO: 1822.

[0871] The AAV particles were purified and formulated in phosphate buffered saline (PBS) with 0.001% F-68, and then administered to non-human primates (Macaca fascicularis) via saphenous vein injection as described in Table 23.

TABLE 23
Study design

| | | Capsid Transgene | | | in-life Duration |
|---|---|---|---|---|---|
| Group | | Dose (vg/kg) | Transgene | Dose (vg/kg) | (weeks)/Gender |
| 1 | (n = 2) | VOY201 | cFXN-HA | 2 × 10¹³ | 4/F |
| | | | (ITR to ITR: SEQ ID NO: 1801) | | |
| 2 | (n = 2) | AAV9 | cFXN-HA | 2 × 10¹³ | 4/F |
| | | | (ITR to ITR: SEQ ID NO: 1801) | | |
| 3 | (n = 2) | VOY201 | cFXN-HA | 6.65 × 10¹² | 4/M |
| | | | plus miR122 | | |
| | | | (ITR to ITR: SEQ ID NO: 1802) | | |
| 4 | (n = 2) | VOY101 | cFXN-HA | 6.65 × 10¹² | 4/M |
| | | | (ITR to ITR: SEQ ID NO: 1801) | | |
| 5 | (n = 2) | Vehicle Control | | | 4/F |
| 6 | (n = 2) | VOY201 | cFXN-HA | 6.3 × 10¹¹ | 4/F |
| | | | plus miR122 | | |
| | | | (ITR to ITR: SEQ ID NO: 1802) | | |
| 7 | (n = 2) | VOY201 | cFXN-HA | 2 × 10¹³ | 4/F |
| | | | plus miR122 | | |
| | | | (ITR to ITR: SEQ ID NO: 1802) | | |
| 8 | (n = 2) | VOY201 | cFXN-HA | 2 × 10¹² | 4/F |
| | | | plus miR122 | | |
| | | | (ITR to ITR: SEQ ID NO: 1802) | | |
| 9 | (n = 2) | VOY201 | cFXN-HA | 2 × 10¹² | 12/F |
| | | | plus miR122 | | |
| | | | (ITR to ITR: SEQ ID NO: 1802) | | |
| 10 | (n = 2) | Vehicle Control | | | 4/F |
| 11 | (n = 3) | VOY101 | miRSOD1 | 3.3 × 10¹³ | 4/2F, 1M |
| | | | (ITR to ITR: SEQ ID NO: 1822) | | |
| 12 | (n = 3) | VOY101 | miRSOD1 | 1.2 × 10¹⁴ | 4/2F, 1M |
| | | | (ITR to ITR: SEQ ID NO: 1822) | | |
| 13 | (n = 2) | Vehicle Control | | | 4/2M |
| 14 | (n = 3) | VOY101 | cFXN-HA | 6.7 × 10¹² | 4/3M |
| | | | (ITR to ITR: SEQ ID NO: 1801) | | |
| 15 | (n = 3) | VOY101 | cFXN-HA | 4.9 × 10¹³ | 4/3M |
| | | | (ITR to ITR: SEQ ID NO: 1801) | | |
| 16 | (n = 3) | AAV9 | cFXN-HA | 4.9 × 10¹³ | 4/3M |
| | | | (ITR to ITR: SEQ ID NO: 1801) | | |

[0872] In a series of studies outlined herein, no moribund non-human primates were observed after IV dosing of AAV9. VOY101 or VOY201 particles carrying different transgenes.

[0873] Clinical observations were obtained daily. No AAV-related clinical observation abnormalities were found up to 12 weeks of study duration. In one study pre-dosing and post-dosing tremors were recorded, but were not dose-related. Based on clinical observations, the treatments were well tolerated by all NHP. See Table 24.

[0874] Body weights were assessed at day of dosing then once weekly, and on the day of necropsy. No significant changes in body weight were observed, indicating that treatments were well tolerated. See Table 24.

TABLE 24
Body weight

| | | | % Change BW | |
|---|---|---|---|---|
| | Capsid Transgene/Dose | % Change BW | D 1 to Day of | Clinical |
| Group | (vg/kg) | D 1 to D 5-8 | Necroscopy | Observations |
| 1-1 | VOY201 cFXN-HA | 0.0 | 2.4 | none |
| 1-2 | 2 × 10¹³ | 3.4 | 2.4 | none |
| 2-1 | AAV9 cFXN-HA | −0.7 | −1.4 | none |
| 2-2 | 2 × 10¹³ | −2.2 | 6.9 | none |
| 3-1 | VOY201 cFXN-HA | 0.0 | −4 | none |
| 3-2 | plus miR122 | 0.0 | −7.1 | none |
| | 6.65 × 10¹² | | | |
| 4-1 | VOY101 cFXN-HA | 3.1 | 3.2 | none |
| 4-2 | 6.65 × 10¹² | 3.1 | 3.2 | none |
| 5-1 | Vehicle Control | 2.4 | −5 | none |
| 5-2 | | −1.3 | −1.6 | none |
| 6-1 | VOY201 cFXN-HA | −1.7 | 1 | tremor wk 1-4 |
| 6-2 | plus miR122 | −0.8 | 2.5 | none |
| | 6.3 × 10¹¹ | | | |
| 7-1 | VOY201 cFXN-HA | 10.7 | −4.9 | none |
| 7-2 | plus miR122 | 8.6 | −6.4 | tremor wk 2-4 |
| | 2 × 10¹³ | | | |
| 8-1 | VOY201 cFXN-HA | 2.8 | −1.4 | none |
| 8-2 | plus miR122 | 0.0 | −1.5 | tremor predose-wk 2 |
| | 2 × 10¹² | | | |
| 9-1 | VOY201 cFXN-HA | −0.8 | 2.7 | tremor wk 2-12 |
| 9-2 | plus miR122 | 0.3 | 8.9 | none |
| | 2 × 10¹² | | | |
| 10-1 | Vehicle Control | 0.3 | 0 | none |
| 10-2 | | 0.9 | −0.5 | none |
| 11-1 | VOY101 miRSOD1 | −0.3 | −4.3 | none |
| 11-2 | 3.3 × 10¹³ | 1.0 | −2 | none |
| 11-3 | | −2.4 | 2 | none |
| 12-1 | VOY101 miRSOD1 | 4.7 | −8.5 | none |
| 12-2 | 1.2 × 10¹⁴ | 4.2 | −9.1 | none |
| 12-3 | | 0.0 | 0.7 | none |
| 13-1 | Vehicle Control | −4.5 | 0 | none |
| 13-2 | | −4.5 | 0 | none |
| 14-1 | VOY101 cFXN-HA | 0.0 | 0 | none |
| 14-2 | 6.7 × 10¹² | 0.0 | 0 | none |
| 14-3 | | 0.0 | 3.8 | none |
| 15-1 | VOY101 cFXN-HA | 3.7 | −3.7 | none |
| 15-2 | 4.9 × 10¹³ | 3.6 | 0 | none |
| 15-3 | | 6.9 | −6.9 | none |
| 16-1 | AAV9 cFXN-HA | 0 | 0 | none |
| 16-2 | 4.9 × 10¹³ | 4.2 | 4.2 | none |
| 16-3 | | 0 | 0 | none |

Legend:
BW = Body Weight
D 1, D 5-D 8 = Days of dosing
None = no findings reported

[0875] To further assess tolerability of treatments, blood and serum samples for clinical chemistry analysis were collected pre-dosing and post-dosing and analyzed for a complete blood cell count and serum clinical chemistry. See Tables 25-26. No physiologically significant changes in clinical chemistry measurement (serum chemistry, hematology, coagulation) were observed after IV dosing of AAV9. VOY101 or VOY201 particles carrying different transgenes. In NHP treated with VOY201-cFXN-HA at 2×10¹² VG/kg, 2 of 4 animals had 3-fold to 4-fold elevated ALTs (with no concomitant TBIL change) on Day 15, which returned to baseline by Day 28. However, at 2×10¹³ VG/kg (10-fold higher dose), no significant changes in ALT were observed. NHP treated IV with AAV9-cFXN-HA at 4.9×10¹³ VG/kg had ALT and AST elevations (average ˜7-fold) on Day 5 (with no concomitant TBIL change) that essentially resolved by Day 15. These 3 animals had elevated PT and PTT that also resolved by Day 15.

TABLE 25
Blood/serum analysis

| | | ALT | | | | AST | | | | Creatine | | | | | |
|---|---|---|---|---|---|---|---|---|---|---|---|---|---|---|---|
| | Capsid Transgene | U/L | U/L | U/L | U/L | U/L | U/L | U/L | U/L | (mg/dL) | | TBIL | | | |
| Grp | Dose (vg/kg) | pre | D 5 | D 15 | Nx | pre | D 5 | 15 | Nx | pre | Nx | Pre | D 5 | D 15 | Nx |
| 1-1 | VOY201 cFXN-HA | 78 | NA | 154 | 74 | 31 | NA | 38 | 30 | 0.8 | 0.7 | 0.4 | NA | 0.2 | 0.2 |
| 1-2 | 2 × 10¹³ | 53 | NA | 134 | 51 | 25 | NA | 36 | 24 | 1.0 | 0.8 | 0.3 | NA | 0.2 | 0.2 |
| 2-1 | AAV9 cFXN-HA | 42 | NA | 34 | 42 | 27 | NA | 26 | 25 | 0.8 | 0.7 | 0.2 | NA | 0.1 | 0.1 |
| 2-2 | 2 × 10¹³ | 47 | NA | 53 | 78 | 23 | NA | 29 | 30 | 0.9 | 0.6 | 0.3 | NA | 0.2 | 0.2 |
| 3-1 | VOY201 cFXN-HA | 61 | NA | 44 | 58 | 106 | NA | 52 | 83 | 0.6 | 0.5 | 0.2 | NA | 0.1 | 0.2 |
| 3-2 | plus miR122 | 46 | NA | 56 | 58 | 65 | NA | 50 | 67 | 0.4 | 0.4 | 0.4 | NA | 0.1 | 0.3 |
| | 6.65 × 10¹² | | | | | | | | | | | | | | |
| 4-1 | VOY101 cFXN-HA | 10 | NA | 11 | 19 | 43 | NA | 42 | 52 | 0.7 | 0.6 | 0.1 | NA | 0.1 | 0.2 |
| 4-2 | 6.65 × 10¹² | 23 | NA | 40 | NA | 70 | NA | 43 | NA | 0.5 | NA | 1.0 | NA | 0.1 | NA |
| 5-1 | Vehicle Control | 44 | NA | 35 | 35 | 26 | NA | 26 | 28 | 0.8 | 0.8 | 0.1 | NA | 0.2 | 0.2 |
| 5-2 | | 31 | NA | 28 | 56 | 22 | NA | 32 | 28 | 0.8 | 0.7 | 0.2 | NA | 0.2 | 0.3 |
| 6-1 | VOY201 cFXN-HA | 24 | NA | 33 | 25 | 58 | NA | 29 | 22 | 1.1 | 0.8 | 0.2 | NA | 0.2 | 0.2 |
| 6-2 | plus miR122 | 24 | NA | 31 | 28 | 21 | NA | 29 | 27 | 0.7 | 0.6 | 0.2 | NA | 0.2 | 0.2 |
| | 6.3 × 10¹¹ | | | | | | | | | | | | | | |
| 7-1 | VOY201 cFXN-HA | 23 | NA | 187 | 29 | 29 | NA | 49 | 30 | 1.0 | 0.8 | 0.3 | NA | 0.4 | 0.3 |
| 7-2 | plus miR122 | 23 | NA | 189 | 27 | 20 | NA | 47 | 22 | 0.6 | 0.5 | 0.2 | NA | 0.3 | 0.2 |
| | 2 × 10¹³ | | | | | | | | | | | | | | |
| 8-1 | VOY201 cFXN-HA | 56 | NA | 33 | 4.7 | 22 | NA | 32 | 26 | 0.7 | 0.6 | 0.2 | NA | 0.2 | 0.2 |
| 8-2 | plus miR122 | 49 | NA | 24 | 58 | 36 | NA | 27 | 29 | 0.7 | 0.7 | 0.2 | NA | 0.3 | 0.2 |
| | 2 × 10¹² | | | | | | | | | | | | | | |
| 9-1 | VOY201 cFXN-HA | 41 | NA | 56 | 54 | 43 | NA | 49 | 46 | 0.7 | 0.6 | 0.4 | NA | 0.4 | 0.6 |
| 9-2 | plus miR122 | 31 | NA | 37 | 39 | 40 | NA | 32 | 28 | 0.6 | 0.7 | 0.1 | NA | 0.2 | 0.1 |
| | 2 × 10¹² | | | | | | | | | | | | | | |
| 10-1 | Vehicle Control | 45 | NA | 43 | 37 | 29 | NA | 26 | 25 | 0.8 | 0.7 | 0.2 | NA | 0.2 | 0.1 |
| 10-2 | | 41 | NA | 24 | 24 | 36 | NA | 28 | 32 | 0.9 | 0.8 | 0.2 | NA | 0.2 | 0.1 |
| 11-1 | VOY101 miRSOD1 | 35 | NA | 61 | 36 | 27 | NA | 36 | 38 | 0.7 | 0.7 | 0.1 | NA | 0.1 | 0.1 |
| 11-2 | 3.3 × 10¹³ | 31 | NA | 40 | 40 | 29 | NA | 28 | 41 | 0.7 | 0.7 | 0.2 | NA | 0.1 | 0.1 |
| 11-3 | | 45 | NA | 53 | 44 | 32 | NA | 30 | 31 | 0.8 | 0.7 | 0.2 | NA | 0.2 | 0.2 |
| 12-1 | VOY101 miRSOD1 | 34 | NA | 42 | 31 | 24 | NA | 30 | 33 | 0.8 | 0.7 | 0.2 | NA | 0.2 | 0.2 |
| 12-2 | 1.2 × 10¹⁴ | 24 | NA | 53 | 20 | 30 | NA | 45 | 36 | 0.7 | 0.5 | 0.1 | NA | 0.2 | 0.1 |
| 12-3 | | 36 | NA | 59 | 37 | 35 | NA | 60 | 57 | 0.7 | 0.7 | 0.2 | NA | 0.2 | 0.2 |
| 13-1 | Vehicle Control | 36 | NA | 73 | 59 | 39 | NA | 42 | 48 | 0.4 | 0.3 | 0.1 | NA | 0.1 | 0.2 |
| 13-2 | | 33 | NA | 42 | 52 | 50 | NA | 43 | 87 | 0.5 | 0.4 | 0.2 | NA | 0.4 | 0.7 |
| 14-1 | VOY101 cFXN-HA | 62 | NA | 34 | 46 | 48 | NA | 41 | 48 | 0.9 | 0.6 | 0.1 | NA | 0.1 | 0.3 |
| 14-2 | 6.7 × 10¹² | 46 | NA | 90 | 67 | 49 | NA | 35 | 42 | 0.6 | 0.5 | 0.3 | NA | 0.3 | 0.3 |
| 14-3 | | 59 | NA | 41 | 41 | 36 | NA | 56 | 53 | 0.7 | 0.6 | 0.1 | NA | 0.2 | 0.3 |
| 15-1 | VOY101 cFXN-HA | 17 | NA | 59 | 34 | NA | NA | 71 | NA | 0.8 | 0.7 | 0.2 | NA | 0.4 | 0.3 |
| 15-2 | 4.9 × 10¹³ | 60 | NA | 49 | NA | NA | NA | NA | NA | 0.9 | NA | 0.2 | NA | 0.1 | NA |
| 15-3 | | 53 | NA | 133 | 68 | NA | NA | 108 | 157 | 0.8 | 0.6 | 0.4 | NA | 0.3 | 0.7 |
| 16-1 | AAV9 cFXN-HA | 71 | 116 | 93 | 78 | 77 | 96 | 91 | 96 | 0.5 | 0.4 | 0.5 | 0.4 | 0.2 | 0.7 |
| 16-2 | 4.9 × 10¹³ | 26 | 285 | 60 | 55 | 63 | 298 | 54 | 159 | 0.6 | 0.7 | 0.6 | 0.4 | 0.2 | 0.4 |
| 16-3 | | 66 | 788 | 83 | 40 | 57 | 581 | 78 | 52 | 0.7 | 0.5 | 0.2 | 0.4 | 0.1 | 0.1 |

Legend
ALT = Alanine Aminotransferase
AST = Aspartate Aminotransferase
TBIL = Total bilirubin
NA = not assessed

TABLE 26
Blood/serum analysis

| | Capsid Transgene Dose | PT | | | | PTT | | | |
|---|---|---|---|---|---|---|---|---|---|
| Group | (vg/kg) | D 1 | D 5 | D 15 | Nx | D 1 | D 5 | D 15 | Nx |
| 1-1 | VOY201 cFXN-HA | 10.4 | NA | 11.5 | 11.4 | 19.6 | NA | 21.0 | 20.2 |
| 1-2 | 2 × 10¹³ | 11.5 | NA | 11.9 | 12.4 | 21.3 | NA | 24.3 | 23.5 |
| 2-1 | AAV9 cFXN-HA | 10.7 | NA | 12.2 | 11.9 | 19.7 | NA | 21.1 | 20.5 |
| 2-2 | 2 × 10¹³ | 10.6 | NA | 9.7 | 9.8 | 21.3 | NA | 21.1 | 21.2 |
| 3-1 | VOY201 cFXN-HA | 11.2 | NA | 9.9 | 11.3 | 27.9 | NA | 28.8 | 29.1 |
| 3-2 | plus miR122 | 12.8 | NA | 9.8 | 10.8 | 23.3 | NA | 21.7 | 22.7 |
| | 6.65 × 10¹³ | | | | | | | | |
| 4-1 | VOY101 cFXN-HA | 10.7 | NA | 9.6 | 10.4 | 24.2 | NA | 23.8 | 22.2 |
| 4-2 | 6.65 × 10¹² | 11.3 | NA | 11.0 | 11.1 | 22.6 | NA | 24.1 | 22.9 |
| 5-1 | Vehicle Control | 10.5 | NA | 11.0 | 10.1 | 21.1 | NA | 23.6 | 21.0 |
| 5-2 | | 10.8 | NA | >100.0 | 9.7 | 21.7 | NA | 28.6 | 22.7 |
| 6-1 | VOY201 cFXN-HA | 11.2 | NA | 10.0 | 11.1 | 22.4 | NA | 24.0 | 23.9 |
| 6-2 | plus miR122 | 10.1 | NA | 10.3 | 10.3 | 24.1 | NA | 24.7 | 22.7 |
| | 6.3 × 10¹¹ | | | | | | | | |
| 7-1 | VOX201 cFXN-HA | 10.2 | NA | 11.2 | 11.6 | 22.3 | NA | 25.1 | 23.9 |
| | plus miR 122 | 10.3 | NA | 10.2 | 10.3 | 23.9 | NA | 25.9 | 24.9 |
| | 2 × 10¹³ | | | | | | | | |
| 8-1 | VOY201 cFXN-HA | 11.0 | NA | 11.0 | 10.7 | 23.2 | NA | 22.5 | 22.0 |
| 8-2 | plus miR122 | 10.3 | NA | 13.4 | 11.0 | 22.5 | NA | 21.5 | 22.7 |
| | 2 × 10¹² | | | | | | | | |
| 9-1 | VOY201 cFXN-HA | 10.7 | NA | 10.8 | 12.9 | 24.9 | NA | 25.1 | 23.5 |
| 9-2 | plus miR122 | 10.3 | NA | 15.4 | 11.0 | 22.3 | NA | 24.3 | 22.6 |
| | 2 × 10¹² | | | | | | | | |
| 10-1 | Vehicle Control | NA | NA | NA | NA | NA | NA | NA | NA |
| 10-2 | | NA | NA | NA | NA | NA | NA | NA | NA |
| 11-1 | VOY101 miRSOD1 | NA | NA | NA | NA | NA | NA | NA | NA |
| 11-2 | 3.3 × 10¹³ | NA | NA | NA | NA | NA | NA | NA | NA |
| 11-3 | | NA | NA | NA | NA | NA | NA | NA | NA |
| 12-1 | VOY101 miRSOD1 | NA | NA | NA | NA | NA | NA | NA | NA |
| 12-2 | 1.2 × 10¹⁴ | NA | NA | NA | NA | NA | NA | NA | NA |
| 12-3 | | NA | NA | NA | NA | NA | NA | NA | NA |
| 13-1 | Vehicle Control | NA | NA | NA | NA | NA | NA | NA | NA |
| 13-2 | | NA | NA | NA | NA | NA | NA | NA | NA |
| 14-1 | VOY101 cFXN-HA | NA | NA | NA | NA | NA | NA | NA | NA |
| 14-2 | 6.7 × 10¹² | NA | NA | NA | NA | NA | NA | NA | NA |
| 14-3 | | NA | NA | NA | NA | NA | NA | NA | NA |
| 15-1 | VOY101 cFXN-HA | NA | NA | NA | NA | NA | NA | NA | NA |
| 15-2 | 4.9 × 10¹³ | NA | NA | NA | NA | NA | NA | NA | NA |
| 15-3 | | NA | NA | NA | NA | NA | NA | NA | NA |
| 16-1 | AAV9 cFXN-HA | 12.8 | 16 | 12.1 | 12.3 | 23.5 | 39.5 | 21.9 | 22.5 |
| 16-2 | 4.9 × 10¹³ | 14.3 | 16.4 | 11.6 | 12.5 | 24.6 | 46.6 | 25 7 | 25.4 |
| 16-3 | | 12.9 | 21.6 | 13.3 | 12.9 | 27.7 | 50.8 | 22.7 | 20.4 |

Legend
PT = Prothrombin time
PTT = Partial thromboplastin time
NA = Not assessed

[0876] At the end of each study time point, several tissue samples were collected for histological processing. Tissues were post-fixed in 4% paraformaldehyde for 12 to 72 hours at 2-8° C. Tissues were embedded in paraffin, sectioned 5 micrometer thick, and stained with hematoxylin and eosin (FLU). Histopathological assessment was performed by light-microscopy by certified pathologists.

[0877] Histopathological evaluation of hematoxylin and eosin stained sections was performed by certified pathologists on selected tissues from a subset of animals as shown in Table 27, In the liver, no pathological findings were observed in the vast majority of NHPs Mild fibrosis was detected in one NHP treated with VOY101-cFXN-HA at 4.9×10¹³ VG/kg. Mild portal hyperplasia was detected in one animal dosed IV with VOY201-cFXN-HA at 2×1013 VG/kg.

[0878] In the DRGs, the majority of NHPs did not display histopathological findings. Mononuclear infiltrates with sporadic neuronal necrosis were observed in animals treated with VOY101-cFXN-HA, 4.9×10¹³ VG/kg (n=1) or VOY20-FXN-HA, 2×10¹³ VG/kg (n=2). See Table 27.

TABLE 27
Histopathological analysis

| | Capsid Transgene | Histopathology | Histopathology | Histopathology | Histopathology |
|---|---|---|---|---|---|
| Grp | Dose (vg/kg) | DRG-cervical | DRG-thoracic | DRG-lumbar | DRG-sacral |
| 1-1 | VOY201 cFXN-HA | none | none | none | NA |
| 1-2 | 2 × 10¹³ | pronounced | pronounced | pronounced | NA |
| | | mononuclear cell | mononuclear cell | mononuclear cell | |
| | | infiltrates and | infiltrates and | infiltrates and | |
| | | sporadic neuronal | sporadic neuronal | sporadic neuronal | |
| | | necrosis | necrosis | necrosis | |
| 2-1 | AAV9 | none | none | none | NA |
| 2-1 | cFXN-HA | none | none | none | NA |
| | 2 × 10¹³ | | | | |
| 3-1 | VOY201 cFXN-HA | none | none | none | NA |
| 3-2 | plus miR122 | none | none | none | NA |
| | 6.65 × 10¹² | | | | |
| 4-1 | VOY101 | none | none | none | NA |
| 4-2 | cFXN-HA | NA | NA | NA | NA |
| | 6.65 × 10¹² | | | | |
| 5-1 | Vehicle Control | minimal infiltrate | none | minimal infiltrate | minimal infiltrate |
| 5-2 | | none | none | none | none |
| 6-1 | VOY201 cFXN-HA | NA | NA | NA | NA |
| 6-2 | plus miR122 | NA | NA | NA | NA |
| | 6.3 × 10¹¹ | | | | |
| 7-1 | VOY201 cFXN-HA | moderate infiltrates, | | marked infiltrates | moderate |
| | plus miR122 | minimal degeneration | | | infiltrates |
| 7-2 | 2 × 10¹³ | none | minimal infiltrates | minimal infiltrate | none |
| 8-1 | VOY201 cFXN-HA | minimal infiltrate | none | minimal infiltrate | none |
| 8-2 | plus miR122 | none | none | none | none |
| | 2 × 10¹² | | | | |
| 9-1 | VOY201 cFXN-HA | none | none | none | none |
| 9-2 | plus miR122 | none | none | none | none |
| | 2 × 10¹² | | | | |
| 10-1 | Vehicle Control | NA | NA | NA | NA |
| 10-2 | | NA | NA | NA | NA |
| 11-1 | VOY101 miRSOD1 | none | none | grade 1 infiltrates | NA |
| 11-2 | 3.3 × 10¹³ | none | none | none | NA |
| 11-3 | | none | grade 5 infiltrates | none | NA |
| 12-1 | VOY101 miRSOD1 | grade 1 axonal | none | none | NA |
| | 1.2 × 10¹⁴ | degeneration | | | |
| 12-2 | | grade 1 axonal | none | grade 1 infiltrates | NA |
| | | degeneration and | | | |
| | | infiltrates | | | |
| 12-3 | | none | none | none | NA |
| 13-1 | Vehicle Control | none | none | none | NA |
| 13-2 | | none | none | grade 1 infiltrates | NA |
| 14-1 | VOY101 cFXN-HA | none | grade 1 infiltrates | grade 1 infiltrates | NA |
| 14-2 | 6.7 × 10¹² | none | none | grade 1 infiltrates | NA |
| 14-3 | | none | none | none | NA |
| 15-1 | VOY101 cFXN-HA | grade 2 infiltrates, | grade 1 infiltrates | grade 2 infiltrates, | NA |
| | 4.9 × 10¹³ | grade 1 necrosis | | grade 1 necrosis | |
| 15-2 | | none | none | none | NA |
| 15-3 | | none | none | none | NA |
| 16-5 | AAV9 cFXN-HA | none | none | none | NA |
| 16-2 | 4.9 × 10¹³ | none | none | none | NA |
| 16-3 | | none | none | none | NA |

Legend
NA = not assessed
None = no findings reported

[0879] In the examined CNS regions (cerebral cortex, striatum, hippocampus, thalamus) no significant histopathological findings were detected in NHPs treated with VOY201-cFXN-HA, up to 2×10¹³ VG/kg (n=4). See Table 28.

TABLE 28
Histopathological analysis

| | Capsid | Histopathology | Histopathology | | | |
|---|---|---|---|---|---|---|
| | Transgene | Striatum/ | Cerebral | Histopathology | Histopathology | Histopathology |
| Grp | Dose (vg/kg) | Basal Nuclei | cortex | Hippocampus | Thalamus | Liver |
| 1-1 | VOY201 cFXN-HA | NA | NA | NA | NA | None |
| 1-2 | 2 × 10¹³ | NA | NA | NA | NA | None |
| 2-1 | AAV9 cFXN-HA | NA | NA | NA | NA | NA |
| 2-1 | 2 × 10¹³ | NA | NA | NA | NA | NA |
| 3-1 | VOY201 cFXN-HA | NA | NA | NA | NA | None |
| 3-2 | plus miR122 | NA | NA | NA | NA | NA |
| | 6.65 × 10¹² | | | | | |
| 4-1 | VOY101 cFXN-HA | NA | NA | NA | NA | None |
| 4-2 | 6.65 × 10¹² | NA | NA | NA | NA | NA |
| 5-1 | Vehicle Control | none | none | none | none | Minimal infiltrate |
| 5-2 | | none | none | none | none | Minimal infiltrate |
| 6-1 | VOY201 cFXN-HA | NA | NA | NA | NA | NA |
| 6-2 | plus miR 122 | NA | NA | NA | NA | NA |
| | 6.3 × 10¹¹ | | | | | |
| 7-1 | VOY201 cFXN-HA | none | none | none | minimal | Mild hyperplasia |
| | plus miR122 | | | | infiltrates | |
| 7-2 | 2 × 10¹³ | none | none | none | none | Minimal infiltrate |
| 8-1 | VOY201 cFXN-HA | none | minimal | none | none | Minimal infiltrate |
| | plus miR122 | | infiltrate | | | |
| 8-2 | 2 × 10¹² | none | none | none | none | none |
| 9-1 | VOY201 cFXN-HA | NA | NA | NA | NA | none |
| 9-2 | plus miR122 | NA | NA | NA | NA | Mild infiltrates |
| | 2 × 10¹² | | | | | |
| 10-1 | Vehicle Control | NA | NA | NA | NA | NA |
| 10-2 | | NA | NA | NA | NA | NA |
| 11-1 | VOY101 | NA | NA | NA | NA | NA |
| 11-2 | miRSOD1 | NA | NA | NA | NA | NA |
| 11-3 | 3.3 × 10¹³ | NA | NA | NA | NA | NA |
| 12-1 | VOY101 | NA | NA | NA | NA | NA |
| 12-2 | miRSOD1 | NA | NA | NA | NA | NA |
| 12-3 | 1.2 × 10¹⁴ | NA | NA | NA | NA | NA |
| 13-1 | Vehicle Control | NA | NA | NA | NA | Grade 1 infiltrates |
| 13-2 | | NA | NA | NA | NA | NA |
| 14-1 | VOY101 | NA | NA | NA | NA | NA |
| 14-2 | cFXN-HA | NA | NA | NA | NA | NA |
| 14-3 | 6.7 × 10¹² | NA | NA | NA | NA | NA |
| 15-1 | VOY101 | NA | NA | NA | NA | Grade 2 fibrosis |
| 15-2 | cFXN-HA | NA | NA | NA | NA | None |
| 15-3 | 4.9 × 10¹³ | NA | NA | NA | NA | none |
| 16-1 | AAV9 | NA | NA | NA | NA | NA |
| 16-2 | cFXN-HA | NA | NA | NA | NA | NA |
| 16-3 | 4.9 × 10¹³ | NA | NA | NA | NA | NA |

Legend
NA = not assessed
None = no findings reported

[0880] In summary, this Example demonstrates that IV AAV vectors comprising novel capsids VOY101 and VOY201 and encoding different transgenes (cFXN-HA, miR-hSOD1) were well-tolerated in adult NHPs at doses up to 1.2×10¹⁴ VG/kg based on clinical signs, body weight, clinical chemistry and histopathology.

### Example 5. VOY101-FXN for the Treatment of Friedreich's Ataxia

[0881] A. In Vivo Distribution. Expression and Efficacy Study with Intravenous Dosing of VOY101-FAN in a Mouse Model of Friedreich's Ataxia

[0882] Selected viral genomes comprising a nucleic acid encoding human frataxin are designed and packaged into a single stranded VOY101 capsid.

[0883] The viral genome from ITR to ITR, recited 5′ to 3′, comprises a wild type ITR, a promoter (which includes a CMVie enhancer, a CBA, or a CMV, or a frataxin promoter, or a truncated CBA or a truncated CMV promoter, and a human beta globin intron), hFXN cDNA sequence, a human growth hormone polyA sequence, a fragment of human albumin as a stuffer sequence, and wild type ITR. The viral genomes are packaged into VOY101 capsids, purified and formulated in phosphate buffered saline (PBS) with 0.001% F-68.

[0884] Six groups of approximately 10 mice/group, at 7 weeks of age, and balanced for gender and litter, receive vehicle (PBS with 0.001% F-68; two groups), or VOY101-FXN vector at either low (2 groups) or high dose (2 groups) levels (approximately 6.3×10¹² vg/kg-2×10¹³ vg/kg body weight) via intravenous injection.

[0885] To test the efficacy, distribution and expression of VOY101-FXN in mice, any test known in the art may be utilized. Non-limiting examples include limb electromyography, notched bar walking test, string hanging test, rotarod test, body weight, and/or survival. Other readouts include FXN protein and mRNA expression in tissues (e.g. dorsal root ganglia, heart, cerebellum, spinal cord) by ELISA, PCR, immunohistochemistry and in situ hybridization, and in situ assessment of mitochondrial enzyme function in tissue (dorsal root ganglia) sections. Vector genome levels in different tissues are determined by PCR and ISH.

[0886] Three groups of animals (vehicle, low dose, high dose) are euthanized by 18 weeks. Three remaining groups of animals (vehicle, low dose, high dose) are maintained for 6 months or longer to assess effect on survival. Control groups (n=10/group) include wild type mice and disease model mice dosed with a reference vector.

[0887] The distribution and expression of human frataxin (hFXN) and vector genome distribution in target tissues such as, but not limited to, DRGs, cerebellum, spinal cord and heart in animals receiving the hFXN vector, is measured by ELISA, PCR, ISH, IHC for hFXN expression and PCR and ISH for vector genome analysis. Human frataxin analysis (by ELISA, PCR, ISH, IHC) demonstrate that upon the delivery of the hFXN vector, expression in target tissues e.g., DRGs, cerebellum, spinal cord and heart occurs with distribution to target tissues. In situ assessment of mitochondrial enzyme activity shows that upon delivery of the hFXN vector, increased activity in slices of DRG occurs. Electromyography, notched bar, string hanging and rotarod tests demonstrate improved performance over vehicle control animals.

B. In Vivo Distribution and Expression Study with Intravenous Dosing of VOY01-FXN in Non-Human Primates

[0888] Selected viral genomes comprising a nucleic acid sequence encoding human frataxin are designed and packaged in a single stranded (ss) VOY101 capsid.

[0889] The single stranded viral genome from ITR to ITR, recited Y to 3′, comprises a wild type ITR, a promoter (which includes a CMVie enhancer, a CBA, or a CMV, or a frataxin promoter, or a truncated CBA or a truncated CMV promoter, and a human beta globin intron), hFXN cDNA sequence, a human growth hormone polyA sequence, a fragment of human albumin as a stuffer sequence, and wild type ITR. The viral genomes are packaged into VOY101 capsids, purified and formulated in phosphate buffered saline (PBS) with 0.001% F-68.

[0890] Eight groups of approximately 3 cynomolgus monkeys/group, approximately 3 years of age or older, with at least one animal of each gender per group, receive vehicle (PBS with 0.001% F-68; two groups), or VOY101-FXN vector at either low (2 groups) or high dose (2 groups) levels (approximately 6.7×10¹² vg/kg-6×10¹³ vg/kg body weight) via intravenous injection.

[0891] To test the efficacy, distribution and expression of VOY101-FXN in NHP, any test known in the art may be utilized. Non-limiting examples include measurement of body weight over time, clinical monitoring, histopathology and blood safety panel testing. Other readouts include FXN protein and mRNA expression in tissues (e.g. dorsal root ganglia, heart, cerebellum, spinal cord) as assessed by ELISA, PCR, immunohistochemistry and in situ hybridization. Vector genome levels in different tissues are determined by PCR and ISH.

[0892] Three groups of animals (vehicle, low dose, high dose) are euthanized by 4 weeks. Three remaining groups of animals (vehicle, low dose, high dose) are maintained for 12 weeks to assess long term gene expression.

[0893] The distribution and expression of human frataxin (hFXN) and vector genome distribution in target tissues such as, but not limited to, DRGs, cerebellum, spinal cord and heart in animals receiving the hFXN vector, is measured by ELISA, PCR, ISH, IHC for hFXN expression and PCR and ISH for vector genome analysis. The primate frataxin expression data are compared to the frataxin expression level which resulted in rescue of the FA disease phenotype in a genetic mouse model of Friedreich's Ataxia. Based on this, efficacious doses for human trials are calculated.

### Example 6. VOY101-APOE miRNA for the Treatment of Alzheimer's Disease

[0894] A. In Vivo Distribution. Expression, and Efficacy Study of Intravenous Dosing of scVOY101-APOE miRNA in Mouse Model of Alzheimer's Disease

[0895] Selected viral genomes comprising pri-miRNA cassettes containing guide strands targeting APOE and passenger strands are engineered into self-complementary (sc) VOY101-miRNA expression vectors.

[0896] The scAAV-miRNA viral genome from ITR to ITR, recited 5′ to 3′, comprises a wild type ITR, a promoter, the pri-miRNA cassette containing guide sequence targeting ApoE and passenger sequence, a polyA sequence, a stuffer sequence, and wild type ITR.

[0897] The viral genomes are packaged into VOY101 capsids, purified and formulated in phosphate buffered saline (PBS) with 0.001% F-68.

[0898] Three groups of P301S mutant tau mice, approximately 20 mice/group, at 2 months of age, are administered vehicle (PBS with 0.001% F-68), or VOY101-APOE miRNA at either high or low dose levels (approximately 4×10¹² vg/kg-4×10¹³ vg/kg) via intravenous tail vein injection.

[0899] Any test known in the art may be utilized to test the efficacy, distribution and expression of VOY10-APOE in mice. Non-limiting examples include the measurement of body weight, expression of APOE mRNA as measured by qRT-PCR, expression of APOE protein as assessed by immunohistochemistry and enzyme-linked immunosorbent assay, levels of amyloid-beta pathology as assessed by immunohistochemistry and enzyme-linked immunosorbent assay, levels of neurodegeneration as assessed by immunohistochemistry, and vector genome levels as measured by digital droplet PCR.

[0900] All animals are evaluated for body weight and survival. Animals are euthanized at approximately 11 months of age for evaluation of brain, spinal cord, and liver samples for APOE mRNA expression, tau and/or amyloid pathology, and neurodegeneration.

[0901] PCR data will demonstrate the delivery of vector genome throughout the brain in animals receiving intravenous VOY101-APOE miRNA vector. Expression data should indicate widespread reduction of APOE protein and mRNA throughout the brain in animals receiving vector. Brain regions demonstrating significant APOE reduction should be those important for tauopathy related disease, including the entorhinal cortex, hippocampus, and cortex. Groups receiving the vector would likely show strong reductions in pathological amyloid-beta and neurodegeneration.

B. In Vivo Distribution and Expression Study of APOE in Non-Human Primates Following Intravenous Dosing of scVOY101-APOE miRNA

[0902] Selected viral genomes comprising pri-miRNA cassettes containing guide strands targeting APOE and passenger strands are engineered into self-complementary (sc) VOY101-miRNA expression vectors.

[0903] The scAAV-miRNA viral genome from ITR to ITR, recited 5′ to 3′, comprises a wild type ITR, a promoter, the pri-miRNA cassette containing guide sequence targeting ApoE and passenger sequence, a polyA sequence, a stuffer sequence, and wild type ITR. [08%] The viral genomes are packaged in into VOY101 capsid, purified and formulated in phosphate buffered saline (PBS) with 0.001% F-68.

[0904] Non-human primates (NHPs) (Cynomolgus macaques, adult male, prescreened for AAV neutralizing antibodies) in three groups are administered scVOY101-ApoE miRNA vector with one group a vehicle only control. The NHPs are administered either high or low dose levels (approximately 4×10¹² vg/kg-4×10¹³ vg/kg) using intravenous delivery, 4 weeks post-administration, a saline perfusion is performed and the brain sectioned into 3 mm coronal blocks and snap-frozen.

[0905] To test the efficacy, distribution and expression of VOY101-APOE miRNA in NHP, any test known in the art may be utilized. Non-limiting examples include measurement of expression of APOE mRNA by qRT-PCR, expression of tau protein as assessed by immunohistochemistry and enzyme-linked immunosorbent assay, and vector genome levels as assessed by digital droplet PCR.

[0906] Brain regions demonstrating significant APOE reduction would be expected to cover areas important for tauopathy related disease, including the entorhinal cortex, hippocampus, and cortex. Consistent with the expression data, PCR would likely demonstrate widespread distribution of vector genome through the brain.

### Example 7. VOY101-APOE2 for the Treatment of Alzheimer Disease and Other Tauopathies

### A. In Vivo Distribution, Expression, and Efficacy Study of Intravenous Dosing of VOY101-APOE2 in Mouse Model of Alzheimer's Disease and Other Tauopathies

[0907] A nucleic acid encoding human APOE2 (apolipoprotein E2 allele) is engineered into an AAV viral genome and packaged in the VOY101 capsid.

[0908] The AAV-APOE2 viral genome, recited 5′ to 3′ from ITR to ITR, comprises a wild type ITR, a promoter, the nucleic acid encoding human APOE2, a polyA sequence, and wild type ITR. The viral genomes are packaged into VOY101 capsids, purified and formulated. The VOY101-APOE2 particles are formulated in phosphate buffered saline (PBS) with 0.001% F-68.

[0909] Three groups of APP.PS1-21/TRE4 mice, approximately 20 mice/group, at 9 months of age, are administered vehicle (PBS with 0.001% F-68), or VOY101-APOE2 at either high or low dose levels (approximately 4×10¹² vg/kg-4×10¹³ vg/kg) via intravenous tail vein injection.

[0910] To test the efficacy, distribution and expression of VOY101-APOE2 in mice, any test known in the art may be utilized. Non-limiting examples include measurements of body weight, expression of APOE2 as assessed by immunohistochemistry and enzyme-linked immunosorbent assay, levels of amyloid-beta pathology as assessed by immunohistochemistry and enzyme-linked immunosorbent assay, levels of neurodegeneration as assessed by immunohistochemistry, and vector genome levels as measured by digital droplet PCR

[0911] All animals are evaluated for body weight and survival. Animals are euthanized at approximately 11 months of age for evaluation of brain, spinal cord, and liver samples APOE2 expression, amyloid and/or tau pathology, and neurodegeneration.

[0912] Distribution of the vector genome through the brain in animals receiving intravenous VOY101-APOE2 is analyzed by PCR. Expression data will likely show widespread expression of APOE2 throughout the brain in animals receiving VOY101-APOE2 vector. Brain regions demonstrating significant APOE2 expression would likely cover areas important for tauopathy related disease, including the entorhinal cortex, hippocampus, and cortex. Groups receiving VOY101-APOE2 vector should show strong reductions in pathological amyloid-beta and/or tau and neurodegeneration.

### B. In Vivo Distribution and Expression Study of Intravenous Dosing of VOY101-APOE2 in Non-Human Primates

[0913] A nucleic acid sequence encoding human APOE2 (apolipoprotein E 2 allele) is engineered into an AAV viral genome and packaged in the VOY101 capsid.

[0914] The AAV-APOE2 viral genome, recited 5′ to 3′ from ITR to ITR, comprises a wild type ITR, a promoter, the nucleic acid encoding human APOE2, a polyA sequence, and wild type ITR. The viral genomes are packaged into VOY101 capsids, purified and formulated. The VOY101-APOE2 particles are formulated in phosphate buffered saline (PBS) with 0.001% F-68.

[0915] Non-human primates (NHPs) (Cynomolgus macaques, adult male, prescreened for AAV neutralizing antibodies) in three groups are administered, by intravenous injection, the VOY101-APOE2 vector with one group a vehicle only control (PBS with 0.001% F-68). The NHPs are administered either high or low dose levels (approximately 4×10¹² vg/kg-4×10¹³ vg/kg) using intravenous delivery. 4 weeks post-administration, a saline perfusion is performed and the brain sectioned into 3 mm coronal blocks and snap-frozen.

[0916] Any test known in the art may be utilized to test the efficacy, distribution and expression of VOY101-APOE2 in NHP. Non-limiting examples include measurement of expression of APOE2 as assessed by immunohistochemistry and enzyme-linked immunosorbent assay and vector genome levels as assessed by digital droplet PCR.

[0917] Expression data will likely show widespread expression of APOE2 throughout the brain in animals receiving VOY101-APOE2 vector. Brain regions demonstrating significant APOE2 levels would likely cover areas important for tauopathy related disease, including the entorhinal cortex, hippocampus, and cortex. Consistent with the expression data. PCR would likely demonstrate widespread distribution of vector genome through the brain.

### Example 8. VOY1101-HTT miRNA for the Treatment of Huntington's Disease

### A. In Vivo Efficacy Study of VOY101-miRNA in Mouse Model of Huntington's Disease

[0918] Selected pri-miRNA cassettes containing guide strands targeting HTT and passenger strands are engineered into scAAV-miRNA viral genomes and packaged into VOY101 capsid.

[0919] The viral genome from ITR to ITR, recited 5′ to 3′, comprises a wild type ITR, a CBA promoter (which includes a CMVie enhancer, a CBA promoter and an SV40 intron), the pri-miRNA cassette containing guide sequence targeting HTT and passenger sequence, a rabbit globin polyA sequence, a fragment of human alpha-1 antitrypsin as a stuffer sequence, and wild type ITR. The viral genomes are packaged into VOY101 capsids, purified and formulated. The VOY101-HTT miRNA particles are formulated in phosphate buffered saline (PBS) with 0.001% F-68.

[0920] Bilateral intrastriatal dosing will be used. Three groups of approximately 12 mice/group, approximately 2 months of age and balanced for sex, will receive vehicle (PBS and 0.001% F-68), or VOY101-HTT miRNA vector at either high or low dose levels (approximately 3×10⁹ vg-5×10¹⁰ vg per striatum).

[0921] To test the efficacy of VOY101-HTT miRNA in mice, any test known in the art may be utilized. Non-limiting examples include measurement of body weight, rotarod, Porsolt swim test, as well as measurement of HTT protein aggregates as assessed by immunohistochemistry.

[0922] All animals will be evaluated for body weight, rotarod. Porsolt swim test and survival. Some animals will be euthanized at 5 months of age (3 months after dosing) for evaluation of striatum tissue samples for HTT mRNA suppression (by RT-qPCR) and HTT protein level by western blot or MSD assay, whereas others will be euthanized at approximately 8 months of age (6 months after dosing) for evaluation of aggregates (by immunohistochemistry).

[0923] HTT measurement data should show widespread reduction of human HTT protein and mRNA throughout the brain in animals receiving HTT miRNA vectors including in primary target areas (striatum and cortex). Groups receiving HTT miRNA vectors would also show reductions in pathological HTT aggregates, and demonstrate significant improvements in lifespan and motor activities.

B. In Vivo Pharmacology and Distribution Study in Non-Human Primates Following Intravenous Dosing of scVOY101-HTT mRNA

[0924] Selected pri-miRNA cassettes containing guide strands targeting HTT and passenger strands are engineered into scAAV-miRNA viral genomes and packaged into VOY101 capsid.

[0925] The scAAV-miRNA viral genome from ITR to ITR recited 5′ to 3′, comprises a wild type ITR, a promoter, the pri-miRNA cassette containing guide sequence targeting HTT and passenger sequence, a polyA sequence, a stuffer sequence, and wild type ITR. The viral genomes are packaged into VOY101 capsids, purified and formulated. The VOY101-HTT miRNA particles are formulated in phosphate buffered saline (PBS) with 0.001% F-68.

[0926] Non-human primates (NHPs) (rhesus macaque, adult male, prescreened for AAV neutralizing antibodies) in three groups are administered scVOY101-HTT miRNA vector. The NHPs are administered either high, middle or low dose levels (approximately 5×10¹² vg/kg, 1.5×10¹³ vg/kg and 4.5×10¹³ vg/kg) using intravenous or intracarotid arterial delivery. 4 weeks post-administration, a saline perfusion is performed and part of spinal cord, brain sections and selected peripheral tissues will be harvested. A subset of tissue will be snap-frozen in liquid nitrogen and a subset will be post-fixed in 4% PFA.

[0927] To test the efficacy of VOY101-HTT miRNA in NHP, any test known in the art may be utilized. Non-limiting examples include measurement of expression of HTT mRNA as measured by bDNA assay and/or qRT-PCR, expression of HTT protein as assessed by western blot and by immunohistochemistry, and vector genome levels as assessed by digital droplet PCR. In addition, clinical observation, serum and CSF clinical pathology, CSF biomarkers and histopathology of CNS and peripheral tissues will be analyzed.

### Example 9. VOY101-SOD1 miRNA for Treatment of Amyotrophic Lateral Sclerosis

[0928] A. In Vivo Pharmacology Study of VOY01-SOD1 miRNA in a Mouse Model of ALS

[0929] Selected pri-miRNA cassettes containing guide strands targeting SOD1 and passenger strands are engineered into scAAV-miRNA viral genomes and packaged into a VOY101 capsid.

[0930] The viral genome from ITR to ITR, recited 5′ to 3′, comprises a wild type ITR, a H1 promoter, the pri-miRNA cassette containing guide sequence targeting SOD1 and passenger sequence, a rabbit globin polyA sequence, and wild type ITR. The viral genomes are packaged into VOY101 capsids, purified, and formulated. The VOY01-SOD1 miRNA particles are formulated in phosphate buffered saline (PBS) with 0.001% F-68.

[0931] Three groups of approximately 10 mice/group, approximately 40-50 days of age and balanced for sex, age and littermates, will receive vehicle (PBS with 0.001% F-68), or VOY101-SOD1 miRNA vector at either high or low dose levels (approximately 5×10¹¹ vg/mouse or 2×10¹² vg/mouse). All the animals will be dosed intravenously. All the animals will be euthanized at approximately 4 weeks after intravenous administration.

[0932] Analytical methods known in the art may be used to assess pharmacological profile, primary readouts will include hSOD1 mRNA and protein expression and vector genome biodistribution in multiple CNS regions and selected peripheral tissues. Secondary readouts will include body weights, immunohistochemistry and cage side observations.

B. In Vivo Efficacy Study of VOY101-SOD1 miRNA in a Mouse Model of ALS

[0933] Selected pri-miRNA cassettes containing guide strands targeting SOD1 and passenger strands are engineered into scAAV-miRNA viral genomes and packaged into a VOY101 capsid.

[0934] The scAAV-miRNA viral genome from ITR to ITR, recited 5′ to 3′, comprises a wild type ITR, a H1 promoter, the pri-miRNA cassette containing guide sequence targeting SOD1 and passenger sequence, a rabbit globin polyA, and wild type ITR. The viral genomes are packaged into VOY101 capsids, purified and formulated. The VOY101-SOD1 miRNA particles are formulated in phosphate buffered saline (PBS) with 0.001% F-68

[0935] Three groups of approximately 36 mice/group, approximately 40-50 days of age and balanced for sex, age and littermates, will receive vehicle, or the vector at either high or low dose levels (approximately 5×10¹¹ vg/mouse or 2×10¹² vg/mouse). All the animals will be dosed intravenously.

[0936] To assess efficacy of VOY101-SOD1 miRNA in mice, analytical methods known in the art may be used to obtain primary readouts will include body weight, behavioral NeuroScore, survival and disease onset and duration. Neurological score will be measured daily. Animals will be euthanized when the NeuroScore for that animal reaches 4. Secondary readouts include hSOD1 mRNA/protein expression, vector genome biodistribution and IHC (skeletal muscle and NMJ imaging, spinal cord).

[0937] The data demonstrate that upon delivery of the intravenous VOY101-SOD1 miRNA vector to the motor neurons, brainstem and motor cortex widespread reduction of SOD1 protein and mRNA occurs.

C. In Vivo Efficacy Study of VOY101-SOD1 miRNA in Canine Degenerative Myelopathy as a Disease Model for ALS

[0938] Selected pri-miRNA cassettes containing guide strands targeting SOD1 and passenger strands are engineered into scAAV-miRNA viral genomes designed and packaged in a VOY101 capsid.

[0939] The scAAV-miRNA viral genome from ITR to ITR, recited 5′ to 3′, comprises a wild type ITR, a H promoter, the pri-miRNA cassette containing guide sequence targeting SOD1 and passenger sequence, a rabbit globin polyA sequence, a stuffer sequence, and wild type ITR. The viral genomes are packaged into VOY101 capsids, purified, and formulated. The VOY01-SOD1 miRNA particles are formulated in phosphate buffered saline (PBS) with 0.001% F-68.

[0940] Companion DM dogs will be screened for pre-existing immunity to the VOY101 capsid by evaluating serum samples in an in vitro neutralizing antibody assay. Dogs with negative nAb will be candidates for the study. Dogs will be divided into two treatment groups and administered either VOY101-SOD1 miRNA or vehicle (PBS with 0.001% F-68) using intravenous dosing.

[0941] To assess efficacy of VOY101-SOD1 miRNA in dog, any test known in the art may be utilized. Non-limiting examples include longitudinal monitoring of gait and neurologic outcome, DTI and MRS, electrodiagnostic testing. MUNE and electrical Impedance Myography (EIM) at the specified time points.

[0942] Serum and CSF samples will be collected at designated times and at the time of euthanasia for evaluating pNF-H and NFL level in dogs. At the time of euthanasia, CNS and peripheral tissues will be collected for SOD1 mRNA quantification and vector genome biodistribution analysis.

[0943] The data demonstrate that upon delivery of the intravenous VOY101-SOD1 miRNA vector to the motor neurons, brainstem and motor cortex reduction of SOD1 protein and mRNA occurs.

D. In Vivo Pharmacology and Distribution Study in Non-Human Primates Following Intravenous Dosing of scVOY101-SOD1 miRNA

[0944] Selected pri-miRNA cassettes containing guide strands targeting SOD1 and passenger strands are engineered into scAAV-miRNA viral genomes and packaged into a VOY101 capsid.

[0945] The scAAV-miRNA viral genomes from ITR to ITR recited 5′ to 3′, comprise a wild type ITR, a promoter, the pri-miRNA cassette containing guide sequence targeting SOD1 and passenger sequence, a polyA sequence, a stuffer sequence, and wild type ITR. The viral genomes are packaged into VOY101 capsids, purified, and formulated. The VOY101-SOD1 miRNA particles are formulated in phosphate buffered saline (PBS) with 0.001% F-68.

[0946] Non-human primates (NHPs) (Cynomolgus macaques, adult male, prescreened for AAV neutralizing antibodies) in three groups are administered sc VOY101-SOD1 miRNA vector. The NHPs are administered either high, middle or low dose levels (approximately 5×10¹² vg/kg, 1.5×10 vg/kg and 4.5×10¹³ vg/kg) using intravenous delivery. 4 weeks post-administration, a saline perfusion is performed and part of spinal cord, brain sections and selected peripheral tissues will be harvested. A subset of the collected tissues will be snap-frozen in liquid nitrogen and another subset will be post-fixed in 4% PFA.

[0947] To determine efficacy and distribution in NHP, any test known in the art may be utilized. Non-limiting examples include measurement of expression of SOD1 mRNA by qRT-PCR, expression of SOD1 protein as assessed by WB and by immunohistochemistry, and vector genome levels as assessed by digital droplet PCR. In addition, clinical observation, serum and CSF clinical pathology, CSF biomarkers and histopathology of CNS and peripheral tissues will be analyzed.

[0948] The data demonstrate that upon intravenous delivery of the VOY101-SOD1 miRNA vector to the spinal cord motor neurons, brainstem and motor cortex, reduction of SOD1 protein and mRNA occurs.

### Example 10. Anti-Tau Antibody Delivery for the Treatment of Alzheimer's Disease and Other Tauopathies

[0949] A. In Vivo Distribution. Expression and Efficacy Study of Intravenous Dosing of VOY101-Anti-Tau Antibody in a Mouse Model of Alzheimer's Disease and Other Tauopathies

[0950] A nucleic acid encoding a monoclonal antibody targeting tau is engineered into an AAV viral genome and produced in the VOY101 capsid.

[0951] The viral genome, recited 5′ to 3′ from ITR to ITR, comprises a wild type ITR, a promoter, the nucleic acid encoding a monoclonal antibody targeting tau, a polyA sequence, and wild type ITR. The viral genomes are packaged into VOY101 capsids, purified and formulated. The VOY101-anti Tau antibody particles are formulated in phosphate buffered saline (PBS) with 0.001% F-68.

[0952] Three groups of P301 S mice, approximately 20 mice/group, at 2 months of age, are administered vehicle (PBS with 0.001% F-68), or VOY101-anti Tau antibody vector at either high or low dose levels (approximately 4×10¹² vg/kg-4×10¹³ vg/kg) via intravenous tail vein injection.

[0953] To test the efficacy, distribution and expression of VOY101-anti Tau antibody in mice, any test known in the art may be utilized. Non-limiting examples include measurement of body weight, rotarod, expression of anti-Tau antibody as assessed by immunohistochemistry and enzyme-linked immunosorbent assay, levels of pathogenic tau as assessed by immunohistochemistry and enzyme-linked immunosorbent assay, levels of neurodegeneration as assessed by immunohistochemistry, and vector genome levels as measured by digital droplet PCR. All animals are evaluated for body weight and survival. Animals are euthanized at approximately 5 months of age for evaluation of brain, spinal cord, and liver samples for antibody expression, tau pathology, and neurodegeneration.

[0954] In the case that VOY101-anti Tau antibody delivery for the treatment of Alzheimer Disease and tauopathy is successful, one might anticipate PCR data to demonstrate delivery of vector genome throughout the brain in animals receiving intravenous VOY101-anti-Tau antibody vector. Expression data will also likely show widespread expression of anti-Tau antibody throughout the brain in animals receiving vector, at levels equal to or exceeding that following passive immunization. Brain regions expected to demonstrate significant antibody levels include areas important for tauopathy related disease, including the entorhinal cortex, hippocampus, and cortex. Groups receiving VOY101-anti Tau antibody vector are expected to show strong reductions in pathological tau and neurodegeneration, and demonstrate significant improvements in lifespan and rotarod performance.

### B. In Vivo Distribution and Expression Study of Intravenous Dosing of VOY101-Anti-Tau Antibody in Non-Human Primates

[0955] A nucleic acid encoding a monoclonal antibody targeting tau is engineered into an AAV viral genome and produced in the VOY101 capsid.

[0956] The viral genome, recited 5′ to 3′ from ITR to ITR, comprises a wild type ITR, a promoter, the nucleic acid encoding a monoclonal antibody targeting tau, a polyA sequence, and wild type ITR. The viral genomes are packaged into VOY101 capsids, purified and formulated. The VOY101-anti Tau particles are formulated in phosphate buffered saline (PBS) with 0.001% F-68.

[0957] Non-human primates (NHPs) (Cynomolgus macaques, adult male, prescreened for AAV neutralizing antibodies) in three groups are administered the VOY101-anti-Tau vector with one group a vehicle only control (PBS with 0.001% F-68). The NHPs are administered either high or low dose levels (approximately 4×10¹² vg/kg-4×10¹³ vg/kg) using intravenous delivery. 4 weeks post-administration, a saline perfusion is performed and the brain sectioned into 3 mm coronal blocks and snap-frozen.

[0958] To test the efficacy, distribution and expression of VOY101-anti Tau antibody in NHP, any test known in the art may be utilized. Non-limiting examples include measurement of expression of anti-Tau antibody as assessed by immunohistochemistry and enzyme-linked immunosorbent assay and vector genome levels as assessed by digital droplet PCR.

[0959] One might anticipate expression data to show that anti-Tau antibody is expressed widely in the NHP brain at levels exceeding that following passive immunization. Brain regions expected to demonstrate significant antibody levels include areas important for tauopathy related disease, including the entorhinal cortex, hippocampus, and cortex. Consistent with the expression data, PCR would likely demonstrate widespread distribution of vector genome through the brain.

### Example 11. VOY101-Tau miRNA for Treatment of Tauopathy

[0960] A. In Vivo Distribution, Expression, and Efficacy Study of Intravenous Dosing of scVOY101-Tau miRNA in a Mouse Model of Tauopathy

[0961] Selected pri-miRNA cassettes containing guide strands targeting Tau and passenger strands are engineered into scAAV-miRNA viral genomes and packaged into a VOY101 capsid.

[0962] The scAAV-miRNA viral genome from ITR to ITR, recited 5′ to 3′, comprises a wild type ITR, a promoter, the pri-miRNA cassette containing guide sequence targeting Tau and passenger sequence, a polyA sequence, a stuffer sequence, and wild type ITR. The viral genomes are packaged into VOY101 capsids, purified and formulated. The VOY101-Tau miRNA particles are formulated in phosphate buffered saline (PBS) with 0.001% F-68.

[0963] Three groups of P301 S mice, approximately 20 mice/group, at 2 months of age, are administered vehicle (PBS with 0.001% F-68), or VOY101-Tau miRNA vector at either high or low dose levels (approximately 4×10¹² vg/kg-4×10¹³ vg/kg) via intravenous tail vein injection.

[0964] To test the efficacy, distribution and expression of VOY101-Tau miRNA in mice, any test known in the art may be utilized. Non-limiting examples include measurement of body weight, rotarod, expression of tau mRNA as measured by qRT-PCR, expression of total human tau as assessed by immunohistochemistry and enzyme-linked immunosorbent assay, levels of pathogenic tau as assessed by immunohistochemistry and enzyme-linked immunosorbent assay, levels of neurodegeneration as assessed by immunohistochemistry, and vector genome levels as measured by digital droplet PCR.

[0965] All animals are evaluated for body weight and survival. Animals are euthanized at approximately 5 months of age for evaluation of brain, spinal cord, and liver samples for Tau mRNA expression, tau pathology, and neurodegeneration.

[0966] In the case that VOY101-Tau miRNA delivery for the treatment of tauopathy is successful, one might anticipate PCR data to demonstrate delivery of vector genome throughout the brain in animals receiving intravenous VOY101-Tau miRNA vector. Expression data would also be expected to show widespread reduction of human tau protein and mRNA throughout the brain in animals receiving VOY101-Tau miRNA vector. Brain regions likely to demonstrate significant tau reduction include areas important for tauopathy related disease, including the entorhinal cortex, hippocampus, and cortex. Groups receiving VOY101-Tau miRNA vector would likely show strong reductions in pathological tau and neurodegeneration, and demonstrate significant improvements in lifespan and rotarod performance.

B. In Vivo Distribution and Expression Study of Tau in Non-Human Primates Following Intravenous Dosing of scVOY101-Tau miRNA

[0967] Selected pri-miRNA cassettes containing guide strands targeting Tau and passenger strands are engineered into scAAV-miRNA viral genomes and packaged into a VOY101 capsid.

[0968] The viral genome from ITR to ITR, recited 5′ to 3′, comprises a wild type ITR, a promoter, the pri-miRNA cassette containing guide sequence targeting Tau and passenger sequence, a polyA sequence, a stuffer sequence, and wild type ITR. The viral genomes are packaged into VOY101 capsids, purified and formulated. The VOY101-Tau miRNA particles are formulated in phosphate buffered saline (PBS) with 0.001% F-68.

[0969] Non-human primates (NHPs) (Cynomolgus macaques, adult male, prescreened for AAV neutralizing antibodies) in three groups are administered the scVOY101-Tau miRNA with one group a vehicle only control (PBS with 0.001% F-68). The NHPs are administered either high or low dose levels of VOY101-Tau miRNA (approximately 4×10¹² vg/kg-4×10¹³ vg/kg) using intravenous delivery. 4 weeks post-administration, a saline perfusion is performed and the brain sectioned into 3 mm coronal blocks and snap-frozen.

[0970] To test the distribution and expression of VOY101-Tau miRNA in NHP, any test known in the art may be utilized. Non-limiting examples include measurement of expression of tau mRNA by qRT-PCR, expression of tau protein as assessed by immunohistochemistry and enzyme-linked immunosorbent assay, and vector genome levels as assessed by digital droplet PCR.

[0971] One might expect expression data to show that tau protein and mRNA is reduced widely in the brain. Brain regions likely to demonstrate significant tau reduction include areas important for tauopathy related disease, including the entorhinal cortex, hippocampus, and cortex. Consistent with the expression data. PCR would likely demonstrate widespread distribution of vector genome through the brain.

### Example 12. Anti-Tau Antibody Delivery for the Treatment of Alzheimer's Disease and Other Tauopathies

### A. In Vivo Distribution, Expression and Efficacy Study of Intravenous Dosing of VOY101 or VOY201-Anti-Tau Antibody

[0972] A nucleic acid encoding the monoclonal antibody PHF-1 targeting tau was engineered into an AAV viral genome and produced in the VOY101 capsid (capsid sequence provided as SEQ ID NO: 1809) or VOY201 capsid (capsid sequence provided as SEQ ID NO: 1810).

[0973] The viral genome, recited 5′ to 3′ from ITR to ITR, comprised a wild type ITR, a promoter, the nucleic acid encoding the monoclonal antibody PHF-1 targeting tau (kozak, heavy chain, linker region, light chain and stop codon provided as SEQ ID NO: 1816), a polyA sequence, and wild type ITR The viral genomes were packaged into VOY101 or VOY201 capsids, purified and formulated. The VOY101 or VOY201-anti Tau antibody particles were formulated in phosphate buffered saline (PBS) with 0.001% F-68.

[0974] Three groups of wild type (WT) mice, approximately 5 mice/group, at 2 months of age, were administered vehicle (PBS with 0.001% F-68), VOY101-anti Tau antibody vector at 1.4×10¹³ vg/kg, or VOY201-anti Tau antibody vector at 1.4×10¹³ vg/kg via intravenous tail vein injection.

[0975] Approximately 28 days following AAV particle administration, several tissue samples were collected. Vector genome digital PCR quantification was performed using a probe set against the CMV enhancer region of the CBA promoter, normalized to host TFRC, and expressed in vector genome per cell (VG/Cell). Vector genome distribution is shown in Table 29 for VOY101.PHF-1 and VOY201.PHF-1. In Table 29, Hp is the hippocampus, SC-C is the cervical spinal cord, SC-T is the thoracic spinal cord, and SC-L is the lumbar spinal cord.

TABLE 29
Vector Genome Distribution in WT Mice after Intravenous Injection

| Vector | VG/Cell Distribution (Standard Dev. in Parenthesis) | | | | | | | | | |
|---|---|---|---|---|---|---|---|---|---|---|
| (Dose: 1.4 × 10¹³ VG/kg) | Hp | | SC-C | | SC-T | | SC-L | | Brainstem | |
| Vehicle | 0.06 | (0.54) | 0.01 | (0.13) | 0.01 | (0.14) | 0.003 | (0.002) | 0.02 | (0.19) |
| VOY101.PHF-1 | 11.01 | (6.22) | 15.45 | (8.20) | 17.82 | (9.67) | 18.59 | (9.49) | 29.80 | (14.68) |
| VOY201.PHF-1 | 4.68 | (1.48) | 9.30 | (2.42) | 7.42 | (2.6) | 9.52 | (2.2) | 16.16 | (4.76) |

[0976] The expression levels of PHF1, present in the soluble fraction of tissue lysates, were also measured in collected tissues by detecting the interaction with paired helical filamentous tau coated on an ELISA plate. The antibody-antigen complex was visualized and quantified using HRP labeled anti-mouse IgG and its substrate TMB, followed by reading at OD450 on a plate reader and normalized to input tissue protein quantity. PHF1 expression from AAV transduced cells is shown in Table 30 for VOY101.PHF1 and VOY201.PHF1. In Table 30, Hp is the hippocampus and SC spinal cord.

TABLE 30
PHF-1 Expression Distribution in WT Mice after Intravenous Injection

| Vector | PHF1 Expression (ng/mg protein, Standard Dev. in Parenthesis) | | | | | | | |
|---|---|---|---|---|---|---|---|---|
| (Dose: 1.4 × 10¹³ VG/kg) | Hp | | Cortex | | SC | | Brainstem | |
| Vehicle | 0 | (0) | 0 | (0) | 0 | (0) | 0 | (0) |
| VOY101.PHF-1 | 82 | (36.4) | 94 | (35.6) | 718 | (440.8) | 394.0 | (301.3) |
| VOY201.PHF-1 | 96 | (35.1) | 66 | (19.6) | 361 | (147.4) | 207.0 | (116.3) |

[0977] IV dosing of PHF-1 in VOY201 resulted in up to 15-fold higher anti-tau antibody levels in mouse CNS as compared to passive immunization. The passive immunization level of antibody in brain is 20-40 ng/mg of protein, and VOY201 provided 2-5× fold above passive in the hippocampus, 5-10× fold above passive in the brain stem, and 8-16× fold above passive in the spinal cord. IV dosing of VOY101 and VOY201 resulted in widespread CNS biodistribution and transduction of vectorized antibodies.

[0978] Mouse brains were hemisected and tissue samples allocated for antibody immunohistochemistry were post-fixed in 4% paraformaldehyde overnight. PHF-1 antibody was detected by immunohistochemistry using anti-mouse IgG1 antibody (PHF-1 is a mouse IgG1 antibody). In animals dosed with 1.4×10¹³ vg/kg via intravenous tail vein injection of VOY101.PHF1 or VOY201.PHF1, staining was observed throughout the brain, including in the hippocampus, cortex, striatum, and thalamus. Numerous PHF1+ cells were observed, including those with neuronal and astroglial morphology. Vehicle-treated control exhibited essentially no detectable background staining

[0979] PHF-1 expression within the CNS after administration of 1.4×10¹³ vg/kg via intravenous tail vein injection of VOY101.PHF-1 or VOY201.PHF1 was evaluated by mouse anti-IgG1 and anti-NeuN double labeling immunofluorescent staining. PHF1 is a mouse IgG1 antibody, and is therefore detected by anti-IgG1 antibody staining. Colocalization studies showed multiple PHF1+ cells including those double-labeled with the neuronal marker (NeuN).

[0980] PHF-1 expression within the CNS after administration of 1.4×10¹³ vg/kg via intravenous tail vein injection of VOY101.PHF-1 was evaluated by mouse anti-IgG1 and anti-GFAP (glial fibrillary acidic protein) double labeling immunofluorescent staining. PHF1 is a mouse IgG antibody, and is therefore detected by anti-IgG1 antibody staining. Colocalization studies showed multiple PHF-1+ cells including those double-labeled with the astrocytic marker (GFAP).

### B. In Vivo Distribution, Expression and Efficacy Study of Intravenous Dosing of VOY101 or VOY201-Anti-Tau Antibody in a Mouse Model

[0981] Three groups of P301 S mice, approximately 20 mice/group, at 2 months of age, were administered vehicle (PBS with 0.001% F-68), VOY101-anti Tau antibody vector (VOY101.PHF-1) at 1.4×10¹³ vg/kg, or VOY201-anti Tau antibody vector (VOY201.PHF-1) at 5.0×10¹³ vg/kg via intravenous tail vein injection.

[0982] Approximately 3 months following AAV particle administration, several tissue samples were collected. Vector genome digital PCR quantification was performed using a probe set against the CMV enhancer region of the CBA promoter, normalized to host TFRC, and expressed in vector genome per cell (VG/Cell). Vector genome distribution is shown in Table 31 for VOY101.PHF-1 and VOY201.PHF-1. In Table 301 Hp is the hippocampus and SC is the spinal cord.

TABLE 31
Vector Genome Distribution in P301S Mice after Intravenous Injection

| | VG/Cell Distribution (Standard Dev. in Parenthesis) | | | | | | | | | |
|---|---|---|---|---|---|---|---|---|---|---|
| Vector | Hp | | Cortex | | Thalamus | | SC | | Brainstem | |
| Vehicle | 0.09 | (0.17) | 0.06 | (0.07) | 0.03 | (0.04) | 0.07 | (0.11) | 0.06 | (0.06) |
| VOY101.PHF-1 | 26.17 | (10.01) | 32.13 | (11.8) | 55.16 | (20.75) | 49.82 | (29.57) | 59.9 | (24.85) |
| (Dose: 1.4 × 10¹³ | | | | | | | | | | |
| VG/kg) | | | | | | | | | | |
| VOY201.PHF-1 | 16.2 | (8.28) | 22.29 | (11.1) | 30.92 | (17.9) | 27.46 | (20.51) | 45.86 | (30.53) |
| (Dose: 5.0 × 10¹³ | | | | | | | | | | |
| VG/kg) | | | | | | | | | | |

[0983] The expression levels of PHF1, present in the soluble fraction of tissue lysates, were also measured in collected tissues by detecting the interaction with paired helical filamentous tau coated on an ELISA plate. The antibody-antigen complex was visualized and quantified using HRP labeled anti-mouse IgG and its substrate TMB, followed by reading at OD450 on a plate reader and normalized to input tissue protein quantity. PHF-1 expression from AAV transduced cells is shown in Table 32 for VOY101.PHF-1 and VOY201.PHF-1. In Table 32, Hp is the hippocampus and SC spinal cord.

TABLE 32
PHF1 Expression in P301S Mice after Intravenous Injection

| | PHF1 Expression (ng/mg protein, Standard Dev. in Parenthesis) | | | | | | | | | |
|---|---|---|---|---|---|---|---|---|---|---|
| Vector | Hp | | Cortex | | Thalamus | | SC | | Brainstem | |
| Vehicle | 0.96 | (4.07) | 0 | (0) | 0.79 | (3.33) | 0 | (0) | 0 | (0) |
| VOY101.PHF-1 | 193.8 | (115.3) | 338.1 | (176.9) | 220.3 | (100.9) | 1103 | (404.8) | 1152 | (630.3) |
| (Dose: 1.4 × 10¹³ | | | | | | | | | | |
| VG/kg) | | | | | | | | | | |
| VOY201.PHF-1 | 140.8 | (87.45) | 238.6 | (120.5) | 210.6 | (103.8) | 902.5 | (317) | 619.3 | (386.8) |
| (Dose: 5.0 × 10¹³ | | | | | | | | | | |
| VG/kg) | | | | | | | | | | |

[0984] IV dosing of VOY101 and VOY201 resulted in high levels of antibody to the CNS of P301 tauopathy mice. AT8 immunoreactivity (IR) is significantly reduced in the PHF1-treated mice. IV dosing using VOY101 and VOY201 resulted in widespread CNS biodistribution and transduction of vectorized antibodies in P301 S tauopathy mice.

### Example 13. Anti-Tau Antibody Delivery for Treatment of Tauopathies Including Alzheimer's Disease

### A. In Vivo Distribution, Expression and Efficacy Study of Intravenous Dosing of VOY101 or VOY201-Anti-Tau Antibody

[0985] A nucleic acid encoding the monoclonal antibody PHF-1 targeting tau is engineered into an AAV viral genome and produced in the VOY101 capsid (capsid sequence provided as SEQ ID NO: 1809) or VOY201 capsid (capsid sequence provided as SEQ ID NO: 1810).

[0986] The viral genome, recited 5′ to 3′ from ITR to ITR, comprised a wild type ITR, a promoter, the nucleic acid encoding the monoclonal antibody PHF-1 targeting tau (light chain (SEQ ID NO: 1819), linker region, heavy chain (SEQ ID NO: 1814) and stop codon), a polyA sequence, and wild type ITR. The viral genomes are packaged into VOY101 or VOY201 capsids, purified and formulated. The VOY101 or VOY201-anti Tau antibody particles are formulated in phosphate buffered saline (PBS) with 0.001% F-68.

[0987] Three groups of wild type (WT) mice, approximately 5 mice/group, at 2 months of age, are administered vehicle (PBS with 0.001% F-68), VOY101-anti Tau antibody vector at 1.4×10¹³ vg/kg, or VOY201-anti Tau antibody vector at 1.4×10¹³ vg/kg via intravenous tail vein injection.

[0988] Approximately 28 days following AAV particle administration, several tissue samples are collected. Vector genome digital PCR quantification is performed using a probe set against the CMV enhancer region of the CBA promoter, normalized to host TFRC, and expressed in vector genome per cell (VG/Cell).

[0989] The expression levels of PHF-1, present in the soluble fraction of tissue lysatcs, are also measured in collected tissues by detecting the interaction with paired helical filamentous tau coated on an ELISA plate. The antibody-antigen complex is visualized and quantified using HRP labeled anti-mouse IgG and its substrate TMB, followed by reading at OD450 on a plate reader and normalized to input tissue protein quantity.

[0990] Mouse brains are hemisected and tissue samples allocated for antibody immunohistochemistry. The samples are post-fixed in 4% paraformaldehyde overnight. PHF-1 antibody is detected by immunohistochemistry using anti-mouse IgG1 antibody (PHF-1 is a mouse IgG1 antibody).

[0991] PHF-1 expression within the CNS after administration of 1.4×10¹³ vg/kg via intravenous tail vein injection of VOY101.PHF-1 or VOY201.PHF-1 is evaluated by mouse anti-IgG1 and anti-NeuN or GFAP (glial fibrillary acidic protein double labeling immunofluorescent staining. PHF-1 is a mouse IgG1 antibody, and is therefore detected by anti-IgG1 antibody staining.

### B. In Vivo Distribution, Expression and Efficacy Study of Intravenous Dosing of VOY101 or VOY201-Anti-Tau Antibody in a Mouse Model

[0992] Three groups of P30 S mice, approximately 20 mice/group, at 2 months of age, are administered vehicle (PBS with 0.001% F-68), VOY101-anti Tau antibody vector (VOY101.PHF-1) at 1.4×10¹³ vg/kg, or VOY201-anti Tau antibody vector (VOY201.PHF-1) at 5.0×10¹³ vg/kg via intravenous tail vein injection.

[0993] Approximately 3 months following AAV particle administration, several tissue samples are collected. Vector genome digital PCR quantification is performed using a probe set against the promoter, normalized to host TFRC, and expressed in vector genome per cell (VG/Cell).

[0994] The expression levels of PHF-1, present in the soluble fraction of tissue lysates, are also measured in collected tissues by detecting the interaction with paired helical filamentous tau coated on an ELISA plate. The antibody-antigen complex is visualized and quantified using HRP labeled anti-mouse IgG and its substrate TMB, followed by reading at OD450 on a plate reader and normalized to input tissue protein quantity.

### Example 14. In Vivo Biodistribution and Transgene Expression Levels Following Intravenous Administration of VOY101-FXN or VOY801-FXN AAV Particles

[0995] A. In Vivo Biodistribution and Transgene Expression Levels Following Intravenous Treatment with VOY1101-FXN or VOY801-FXN AAV Particles

[0996] Widespread gene transfer into the central nervous system, peripheral nervous system, and heart was observed in mice after intravenous administration of AAV vectors with capsid serotypes VOY101, VOY801, or VOY1101, encapsidating a vector genome comprising a synthetic promoter composed of CMV enhancer sequence and chicken beta-actin (CBA) promoter sequence, Macaca fascicularis (cynomolgus) frataxin-HA (cFXN-HA) and a human growth hormone polyadenylation sequence, flanked by AAV packaging signal inverted terminal repeats (ITRs) derived from AAV2 wild-type virus. The AAV particles were produced by triple transfection in HEK293T cells. The ITR to ITR sequence of the vector genome is provided as SEQ ID NO. 1826, or as SEQ ID NO. 1827. Results for the transfection of the vector genome comprising SEQ ID NO. 1826 are illustrated in Tables 33 and 34.

[0997] The single-stranded AAV particles having the serotype VOY1101, VOY801, or VOY101 were purified and formulated in phosphate buffered saline (PBS) with 0.001% F-68. The formulated AAV particles were administered to adult C57Bl1/6J mice at 8 weeks of age via lateral tail vein injection at a concentration of 5 ml/kg, with a vector concentration of 4.0×10¹² vg/mL. The total dose was 2.0×10¹⁴ VG/kg. A control group treated with vehicle (PBS with 0.001% F-68) was dosed in parallel. VOY101 was used as a comparator for VOY1101 and VOY801.

[0998] Twenty-eight days following AAV particle or vehicle administration, several tissue samples were collected and flash-frozen in liquid nitrogen. Droplet digital PCR quantification of vector genome copies was performed using a probe set against the CMV enhancer region of the CBA promoter, normalized to host (mouse) TFRC, and expressed as vector genome per diploid cell (VG/DC), cFXN-HA protein levels were measured by ELISA and reported in ng cFXN-HA/mg of total protein, cFXN-HA protein levels and vector genome levels are shown in Tables 33 and 34, respectively. In Tables 33 and 34, “BLLQ” means below lower limit of quantification. For cFXN-HA protein levels, the LLOQ was approximately 0.89 ng/mg protein. For VG levels, the LLOQ was approximately 0.005 VG/DC. Experiments were conducted in quadruplicate.

TABLE 33
cFXN-HA Expression (ng/mg protein) in Mouse after Intravenous Injection

| AAV Serotype | | | | | | Thoracic | | |
|---|---|---|---|---|---|---|---|---|
| (Nucleotide | | | | | Thoracic | Dorsal Root | | |
| SEQ ID NO) | Cortex | Striatum | Hippocampus | Brainstem | Spinal Cord | Ganglia | Heart | Liver |
| VOY1101 | 979.01 ± 68.4 | 932.1 ± 156.05 | n.d. | n.d. | 1398.9 ± 147.4 | n.d. | n.d. | 23.2 ± 6.4 |
| (SEQ ID NO: 1825) | | | | | | | | |
| VOY801 | 325.2 ± 152.2 | 185.4 ± 76.8 | n.d. | n.d. | 357.9 ± 132.5 | n.d. | n.d. | 59.8 ± 13.9 |
| (SEQ ID NO: 1824) | | | | | | | | |
| VOY101 | 259.1 ± 129.8 | 2.21.04 ± 153.3 | n.d. | n.d. | 342.2 ± 220.3 | n.d. | n.d. | 11.3 ± 5.1 |
| (SEQ ID NO: 1809) | | | | | | | | |
| Vehicle | BLLQ | BLLQ | n.d. | n.d. | BLLQ | n.d. | n.d. | BLLQ |

TABLE 34
Vector Genome Distribution in Mouse after Intravenous Injection (vector genome/diploid cell)

| AAV Serotype | | | | | | Thoracic | | |
|---|---|---|---|---|---|---|---|---|
| (Nucleotide | | | | | Thoracic | Dorsal Root | | |
| SEQ ID NO) | Cortex | Striatum | Hippocampus | Brainstem | Spinal Cord | Ganglia | Heart | Liver |
| VOY1101 | 41.88 ± 8.96 | 45.12 ± 3.03 | 35.27 ± 10.66 | 77.39 ± 8.96 | 59.32 ± 7.37 | 5.87 ± 5.21 | 2.48 ± 1.16 | 20.78 ± 5.26 |
| (SEQ ID NO: 1825) | | | | | | | | |
| VOY801 | 21.58 ± 4.31 | 22.09 ± 6.06 | 16.71 ± 3.04 | 31.65 ± 8.61 | 21.86 ± 5.8.3 | 1.44 ± 0.57 | 3.51 ± 2.96 | 91.2 ± 46.06 |
| (SEQ ID NO: 1824) | | | | | | | | |
| VOY101 | 18.36 ± 12.16 | 22.36 ± 13.49 | 15.46 ± 9.82 | 28.97 ± 15.98 | 20.22 ± 10.82 | 0.56 ± 0.34 | 1.23 ± 1.22 | 2.48 ± 1.17 |
| (SEQ ID NO: 1809) | | | | | | | | |
| Vehicle | BLLQ | | | | BLLQ | BLLQ | BLLQ | BLLQ |

[0999] In mouse cortex, twenty-eight days after intravenous injection of 2.0×10¹³ vg/kg, VOY1101-cFXN-HA resulted in 2.3-fold higher vector genome levels and 3.8-fold higher cFXN-HA expression than VOY101-cFXN-HA, and injection of VOY801-cFXN-HA resulted in levels of vector genome and cFXN-HA expression similar to that of VOY101-cFXN-HA. In mouse striatum, twenty-eight days after intravenous injection of 2.0×10¹³ vg/kg. VOY1101-cFXN-HA resulted in 2.02-fold higher vector genome levels and 4.2-fold higher cFXN-HA expression than VOY101-cFXN-HA, and injection of VOY801-cFXN-HA resulted in levels of vector genome and cFXN-HA expression similar to that of VOY101-cFXN-HA.

[1000] In mouse hippocampus, twenty-eight days after intravenous injection of 2.0×10¹³ vg/kg, VOY101-cFXN-HA resulted in 2.3-fold higher vector genome levels than VOY101-cFXN-HA, and injection of VOY801-cFXN-HA resulted in levels of vector genome similar to that of VOY101-cFXN-HA. In mouse brainstem, twenty-eight days after intravenous injection of 2.0×10¹³ vg/kg, VOY1101-cFXN-HA resulted in 2.67-fold higher vector genome levels than VOY101-cFXN-HA, and injection of VOY801-cFXN-HA resulted in levels of vector genome similar to that of VOY101-cFXN-HA.

[1001] In mouse thoracic spinal cord, twenty-eight days after intravenous injection of 2.0×10¹² vg/kg, VOY1101-cFXN-HA resulted in 2.93-fold higher vector genome levels and 4.1-fold higher cFXN-HA protein expression than VOY101-cFXN-HA, and injection of VOY801-cFXN-HA resulted in levels of vector genome and cFXN-HA expression similar to that of VOY101-cFXN-HA. In dorsal root ganglia, twenty-eight days after intravenous injection of 2.0×10¹³ vg/kg. VOY1101-cFXN-HA administration resulted in levels of vector genome 10.48 higher than that of VOY101-cFXN-HA, and injection of VOY801-cFXN-HA resulted in 2.57-fold higher vector genome levels than VOY101-cFXN-HA.

[1002] In heart, twenty-eight days after intravenous injection of 2.0×10¹³ vg/kg, VOY1101-cFXN-HA resulted in 2.02-fold higher vector genome levels than VOY101-cFXN-HA, and injection of VOY801-cFXN-HA resulted in 2.85-fold higher vector genome levels than VOY101-cFXN-HA.

[1003] Correlation plots of the biodistribution (VG/DC) and AAV transduction (FXN protein, ng per mg total protein) of VOY1101-cFXN-HA and VOY101-cFXN-HA in the cortex, striatum and spinal cord indicated that VOY101-cFXN-HA consistently showed greater biodistribution and transduction than VOY101-cFXN-HA.

[1004] Based on immunofluorescence analysis of immuno-staining for a component of the viral genome and relevant cellular markers for neurons (NeuN) and astrocytes (GFAP), VOY1101 showed transduction of both neurons and astrocytes across multiple brain regions (e.g., cortex and hippocampus). This capsid variant demonstrated low peripheral exposure in other organs after intravenous administration in mice. These results show that AAV capsids such as VOY1101 have strong blood-brain barrier penetrant properties subsequent to intravenous administration.

### VIII. EQUIVALENTS AND SCOPE

[1005] Those skilled in the art will recognize, or be able to ascertain using no more than routine experimentation, many equivalents to the specific embodiments in accordance with the disclosure. The scope of the present disclosure is not intended to be limited to the above Description, but rather is as set forth in the appended claims.

[1006] In the claims, articles such as “a,” “an,” and “the” may mean one or more than one unless indicated to the contrary or otherwise evident from the context. Claims or descriptions that include “or” between one or more members of a group are considered satisfied if one, more than one, or all of the group members are present in, employed in, or otherwise relevant to a given product or process unless indicated to the contrary or otherwise evident from the context. The disclosure includes embodiments in which exactly one member of the group is present in, employed in, or otherwise relevant to a given product or process. The disclosure includes embodiments in which more than one, or the entire group members are present in, employed in, or otherwise relevant to a given product or process.

[1007] It is also noted that the term “comprising” is intended to be open and permits but does not require the inclusion of additional elements or steps. When the term “comprising” is used herein, the term “consisting of” is thus also encompassed and disclosed.

[1008] Where ranges are given, endpoints are included. Furthermore, it is to be understood that unless otherwise indicated or otherwise evident from the context and understanding of one of ordinary skill in the art, values that are expressed as ranges can assume any specific value or subrange within the stated ranges in different embodiments of the disclosure, to the tenth of the unit of the lower limit of the range, unless the context clearly dictates otherwise.

[1009] In addition, it is to be understood that any particular embodiment of the present disclosure that falls within the prior art may be explicitly excluded from any one or more of the claims. Since such embodiments are deemed to be known to one of ordinary skill in the art, they may be excluded even if the exclusion is not set forth explicitly herein. Any particular embodiment of the compositions of the disclosure (e.g., any antibiotic, therapeutic or active ingredient; any method of production; any method of use; etc.) can be excluded from any one or more claims, for any reason, whether or not related to the existence of prior art.

[1010] It is to be understood that the words which have been used are words of description rather than limitation, and that changes may be made within the purview of the appended claims without departing from the true scope and spirit of the disclosure in its broader aspects.

[1011] While the present disclosure has been described at some length and with some particularity with respect to the several described embodiments, it is not intended that it should be limited to any such particulars or embodiments or any particular embodiment, but it is to be construed with references to the appended claims so as to provide the broadest possible interpretation of such claims in view of the prior art and, therefore, to effectively encompass the intended scope of the disclosure.

[1012] All publications, patent applications, patents, and other references mentioned herein are incorporated by reference in their entirety. In case of conflict, the present specification, including definitions, will control. In addition, section headings, the materials, methods, and examples are illustrative only and not intended to be limiting.

The application's sequence listing, which the Patent Office published only in electronic form, follows.

SEQUENCE LISTING (1827 sequences)

SEQ ID NO: 1 - protein, 743 aa, Artificial Sequence
  Description of Artificial Sequence: Synthetic polypeptide
MAADGYLPDWLEDNLSEGIREWWALKPGAPQPKANQQHQDNARGLVLPGYKYLGPGNGLDKGEPVNAADAAALEHDKAYDQQLKAGDNPYLKYNHADAEFQERLKEDTSFGGNLGRAVFQAKKRLLEPLGLVEEAAKTAPGKKRPVEQSPQEPDSSAGIGKSGAQPAKKRLNFGQTGDTESVPDPQPIGEPPAAPSGVGSLTMASGGGAPVADNNEGADGVGSSSGNWHCDSQWLGDRVITTSTRTWALPTYNNHLYKQISNSTSGGSSNDNAYFGYSTPWGYFDFNRFHCHFSPRDWQRLINNNWGFRPKRLNFKLFNIQVKEVTDNNGVKTIANNLTSTVQVFTDSDYQLPYVLGSAHEGCLPPFPADVFMIPQYGYLTLNDGSQAVGRSSFYCLEYFPSQMLRTGNNFQFSYEFENVPFHSSYAHSQSLDRLMNPLIDQYLYYLSKTINGSGQNQQTLKFSVAGPSNMAVQGRNYIPGPSYRQQRVSTTVTQNNNSEFAWPGASSWALNGRNSLMNPGPAMASHKEGEDRFFPLSGSLIFGKQGTGRDNVDADKVMITNEEEIKTTNPVATESYGQVATNHQSDGTLAVPFKAQAQTGWVQNQGILPGMVWQDRDVYLQGPIWAKIPHTDGNFHPSPLMGGFGMKHPPPQILIKNTPVPADPPTAFNKDKLNSFITQYSTGQVSVEIEWELQKENSKRWNPEIQYTSNYYKSNNVEFAVNTEGVYSEPRPIGTRYLTRNL

SEQ ID NO: 2 - protein, 743 aa, Artificial Sequence
  Description of Artificial Sequence: Synthetic polypeptide
MAADGYLPDWLEDNLSEGIREWWALKPGAPQPKANQQHQDNARGLVLPGYKYLGPGNGLDKGEPVNAADAAALEHDKAYDQQLKAGDNPYLKYNHADAEFQERLKEDTSFGGNLGRAVFQAKKRLLEPLGLVEEAAKTAPGKKRPVEQSPQEPDSSAGIGKSGAQPAKKRLNFGQTGDTESVPDPQPIGEPPAAPSGVGSLTMASGGGAPVADNNEGADGVGSSSGNWHCDSQWLGDRVITTSTRTWALPTYNNHLYKQISNSTSGGSSNDNAYFGYSTPWGYFDFNRFHCHFSPRDWQRLINNNWGFRPKRLNFKLFNIQVKEVTDNNGVKTIANNLTSTVQVFTDSDYQLPYVLGSAHEGCLPPFPADVFMIPQYGYLTLNDGSQAVGRSSFYCLEYFPSQMLRTGNNFQFSYEFENVPFHSSYAHSQSLDRLMNPLIDQYLYYLSRTINGSGQNQQTLKFSVAGPSNMAVQGRNYIPGPSYRQQRVSTTVTQNNNSEFAWPGASSWALNGRNSLMNPGPAMASHKEGEDRFFPLSGSLIFGKQGTGRDNVDADKVMITNEEEIKTTNPVATESYGQVATNHQSDGTLAVPFKAQAQTGWVQNQGILPGMVWQDRDVYLQGPIWAKIPHTDGNFHPSPLMGGFGMKHPPPQILIKNTPVPADPPTAFNKDKLNSFITQYSTGQVSVEIEWELQKENSKRWNPEIQYTSNYYKSNNVEFAVNTEGVYSEPRPIGTRYLTRNL

SEQ ID NO: 3 - protein, 743 aa, Artificial Sequence
  Description of Artificial Sequence: Synthetic polypeptide
MAADGYLPDWLEDNLSEGIREWWALKPGAPQPKANQQHQDNARGLVLPGYKYLGPGNGLDKGEPVNAADAAALEHDKAYDQQLKAGDNPYLKYNHADAEFQERLKEDTSFGGNLGRAVFQAKKRLLEPLGLVEEAAKTAPGKKRPVEQSPQEPDSSAGIGKSGAQPAKKRLNFGQTGDTESVPDPQPIGEPPAAPSGVGSLTMASGGGAPVADNNEGADGVGSSSGNWHCDSQWLGDRVITTSTRTWALPTYNNHLYKQISNSTSGGSSNDNAYFGYSTPWGYFDFNRFHCHFSPRDWQRLINNNWGFRPKRLNFKLFNIQVKEVTDNNGVKTIANNLTSTVQVFTDSDYQLPYVLGSAHEGCLPPFPADVFMIPQYGYLTLNDGSQAVGRSSFYCLEYFPSQMLRTGNNFQFSYEFENVPFHSSYAHSQSLDRLMNPLIDQYLYYLSRTINGSGQNQQTLKFSVAGPSNMAVQGRNYIPGPSYRQQRVSTTVTQNNNSEFAWPGASSWALNGRNSLMNPGPAMASHKEGEDRFFPLSGSLIFGKQGTGRDNVDADKVMITNEEEIKTTNPVATESYGQVATNHQSAQTLAVPFKAQAQTGWVQNQGILPGMVWQDRDVYLQGPIWAKIPHTDGNFHPSPLMGGFGMKHPPPQILIKNTPVPADPPTAFNKDKLNSFITQYSTGQVSVEIEWELQKENSKRWNPEIQYTSNYYKSNNVEFAVNTEGVYSEPRPIGTRYLTRNL

SEQ ID NO: 4 - DNA, 2232 bp, Artificial Sequence
  Description of Artificial Sequence: Synthetic polynucleotide
atggctgccgatggttatcttccagattggctcgaggacaaccttagtgaaggaattcgcgagtggtgggctttgaaacctggagcccctcaacccaaggcaaatcaacaacatcaagacaacgctcgaggtcttgtgcttccgggttacaaataccttggacccggcaacggactcgacaagggggagccggtcaacgcagcagacgcggcggccctcgagcacgacaaggcctacgaccagcagctcaaggccggagacaacccgtacctcaagtacaaccacgccgacgccgagttccaggagcggctcaaagaagatacgtcttttgggggcaacctcgggcgagcagtcttccaggccaaaaagaggcttcttgaacctcttggtctggttgaggaagcggctaagacggctcctggaaagaagaggcctgtagagcagtctcctcaggaaccggactcctccgcgggtattggcaaatcgggtgcacagcccgctaaaaagagactcaatttcggtcagactggcgacacagagtcagtcccagaccctcaaccaatcggagaacctcccgcagccccctcaggtgtgggatctcttacaatggcttcaggtggtggcgcaccagtggcagacaataacgaaggtgccgatggagtgggtagttcctcgggaaattggcattgcgattcccaatggctgggggacagagtcatcaccaccagcacccgaacctgggccctgcccacctacaacaatcacctctacaagcaaatctccaacagcacatctggaggatcttcaaatgacaacgcctacttcggctacagcaccccctgggggtattttgacttcaacagattccactgccacttctcaccacgtgactggcagcgactcatcaacaacaactggggattccggcctaagcgactcaacttcaagctcttcaacattcaggtcaaagaggttacggacaacaatggagtcaagaccatcgccaataaccttaccagcacggtccaggtcttcacggactcagactatcagctcccgtacgtgctcgggtcggctcacgagggctgcctcccgccgttcccagcggacgttttcatgattcctcagtacgggtatctgacgcttaatgatggaagccaggccgtgggtcgttcgtccttttactgcctggaatatttcccgtcgcaaatgctaagaacgggtaacaacttccagttcagctacgagtttgagaacgtacctttccatagcagctacgctcacagccaaagcctggaccgactaatgaatccactcatcgaccaatacttgtactatctctctagaactattaacggttctggacagaatcaacaaacgctaaaattcagtgtggccggacccagcaacatggctgtccagggaagaaactacatacctggacccagctaccgacaacaacgtgtctcaaccactgtgactcaaaacaacaacagcgaatttgcttggcctggagcttcttcttgggctctcaatggacgtaatagcttgatgaatcctggacctgctatggccagccacaaagaaggagaggaccgtttctttcctttgtctggatctttaatttttggcaaacaaggtaccggcagagacaacgtggatgcggacaaagtcatgataaccaacgaagaagaaattaaaactactaacccggtagcaacggagtcctatggacaagtggccacaaaccaccagagtgcccaaactttggcggtgccttttaaggcacaggcgcagaccggttgggttcaaaaccaaggaatacttccgggtatggtttggcaggacagagatgtgtacctgcaaggacccatttgggccaaaattcctcacacggacggcaactttcacccttctccgctgatgggagggtttggaatgaagcacccgcctcctcagatcctcatcaaaaacacacctgtacctgcggatcctccaacggccttcaacaaggacaagctgaactctttcatcacccagtattctactggccaagtcagcgtggagatcgagtgggagctgcagaaggaaaacagcaagcgctggaacccggagatccagtacacttccaactattacaagtctaataatgttgaatttgctgttaatactgaaggtgtatatagtgaaccccgccccattggcaccagatacctgactcgtaatctgtaa

SEQ ID NO: 5 - protein, 736 aa, Artificial Sequence
  Description of Artificial Sequence: Synthetic polypeptide
MAADGYLPDWLEDNLSEGIREWWALKPGAPQPKANQQHQDNARGLVLPGYKYLGPGNGLDKGEPVNAADAAALEHDKAYDQQLKAGDNPYLKYNHADAEFQERLKEDTSFGGNLGRAVFQAKKRLLEPLGLVEEAAKTAPGKKRPVEQSPQEPDSSAGIGKSGAQPAKKRLNFGQTGDTESVPDPQPIGEPPAAPSGVGSLTMASGGGAPVADNNEGADGVGSSSGNWHCDSQWLGDRVITTSTRTWALPTYNNHLYKQISNSTSGGSSNDNAYFGYSTPWGYFDFNRFHCHFSPRDWQRLINNNWGFRPKRLNFKLFNIQVKEVTDNNGVKTIANNLTSTVQVFTDSDYQLPYVLGSAHEGCLPPFPADVFMIPQYGYLTLNDGSQAVGRSSFYCLEYFPSQMLRTGNNFQFSYEFENVPFHSSYAHSQSLDRLMNPLIDQYLYYLSRTIQSSQTPRQTLKFSVAGPSNMAVQGRNYIPGPSYRQQRVSTTVTQNNNSEFAWPGASSWALNGRNSLMNPGPAMASHKEGEDRFFPLSGSLIFGKQGTGRDNVDADKVMITNEEEIKTTNPVATESYGQVATNHQSAQAQAQTGWVQNQGILPGMVWQDRDVYLQGPIWAKIPHTDGNFHPSPLMGGFGMKHPPPQILIKNTPVPADPPTAFNKDKLNSFITQYSTGQVSVEIEWELQKENSKRWNPEIQYTSNYYKSNNVEFAVNTEGVYSEPRPIGTRYLTRNL

SEQ ID NO: 6 - protein, 743 aa, Artificial Sequence
  Description of Artificial Sequence: Synthetic polypeptide
MAADGYLPDWLEDNLSEGIREWWALKPGAPQPKANQQHQDNARGLVLPGYKYLGPGNGLDKGEPVNAADAAALEHDKAYDQQLKAGDNPYLKYNHADAEFQERLKEDTSFGGNLGRAVFQAKKRLLEPLGLVEEAAKTAPGKKRPVEQSPQEPDSSAGIGKSGAQPAKKRLNFGQTGDTESVPDPQPIGEPPAAPSGVGSLTMASGGGAPVADNNEGADGVGSSSGNWHCDSQWLGDRVITTSTRTWALPTYNNHLYKQISNSTSGGSSNDNAYFGYSTPWGYFDFNRFHCHFSPRDWQRLINNNWGFRPKRLNFKLFNIQVKEVTDNNGVKTIANNLTSTVQVFTDSDYQLPYVLGSAHEGCLPPFPADVFMIPQYGYLTLNDGSQAVGRSSFYCLEYFPSQMLRTGNNFQFSYEFENVPFHSSYAHSQSLDRLMNPLIDQYLYYLSRTIILGTGTSQTLKFSVAGPSNMAVQGRNYIPGPSYRQQRVSTTVTQNNNSEFAWPGASSWALNGRNSLMNPGPAMASHKEGEDRFFPLSGSLIFGKQGTGRDNVDADKVMITNEEEIKTTNPVATESYGQVATNHQSAQTRTNPEAAQAQTGWVQNQGILPGMVWQDRDVYLQGPIWAKIPHTDGNFHPSPLMGGFGMKHPPPQILIKNTPVPADPPTAFNKDKLNSFITQYSTGQVSVEIEWELQKENSKRWNPEIQYTSNYYKSNNVEFAVNTEGVYSEPRPIGTRYLTRNL

SEQ ID NO: 7 - protein, 743 aa, Artificial Sequence
  Description of Artificial Sequence: Synthetic polypeptide
MAADGYLPDWLEDNLSEGIREWWALKPGAPQPKANQQHQDNARGLVLPGYKYLGPGNGLDKGEPVNAADAAALEHDKAYDQQLKAGDNPYLKYNHADAEFQERLKEDTSFGGNLGRAVFQAKKRLLEPLGLVEEAAKTAPGKKRPVEQSPQEPDSSAGIGKSGAQPAKKRLNFGQTGDTESVPDPQPIGEPPAAPSGVGSLTMASGGGAPVADNNEGADGVGSSSGNWHCDSQWLGDRVITTSTRTWALPTYNNHLYKQISNSTSGGSSNDNAYFGYSTPWGYFDFNRFHCHFSPRDWQRLINNNWGFRPKRLNFKLFNIQVKEVTDNNGVKTIANNLTSTVQVFTDSDYQLPYVLGSAHEGCLPPFPADVFMIPQYGYLTLNDGSQAVGRSSFYCLEYFPSQMLRTGNNFQFSYEFENVPFHSSYAHSQSLDRLMNPLIDQYLYYLSRTIILGTGTSQTLKFSVAGPSNMAVQGRNYIPGPSYRQQRVSTTVTQNNNSEFAWPGASSWALNGRNSLMNPGPAMASHKEGEDRFFPLSGSLIFGKQGTGRDNVDADKVMITNEEEIKTTNPVATESYGQVATNHQSAQNGGTSSSAQAQTGWVQNQGILPGMVWQDRDVYLQGPIWAKIPHTDGNFHPSPLMGGFGMKHPPPQILIKNTPVPADPPTAFNKDKLNSFITQYSTGQVSVEIEWELQKENSKRWNPEIQYTSNYYKSNNVEFAVNTEGVYSEPRPIGTRYLTRNL

SEQ ID NO: 8 - protein, 743 aa, Artificial Sequence
  Description of Artificial Sequence: Synthetic polypeptide
MAADGYLPDWLEDNLSEGIREWWALKPGAPQPKANQQHQDNARGLVLPGYKYLGPGNGLDKGEPVNAADAAALEHDKAYDQQLKAGDNPYLKYNHADAEFQERLKEDTSFGGNLGRAVFQAKKRLLEPLGLVEEAAKTAPGKKRPVEQSPQEPDSSAGIGKSGAQPAKKRLNFGQTGDTESVPDPQPIGEPPAAPSGVGSLTMASGGGAPVADNNEGADGVGSSSGNWHCDSQWLGDRVITTSTRTWALPTYNNHLYKQISNSTSGGSSNDNAYFGYSTPWGYFDFNRFHCHFSPRDWQRLINNNWGFRPKRLNFKLFNIQVKEVTDNNGVKTIANNLTSTVQVFTDSDYQLPYVLGSAHEGCLPPFPADVFMIPQYGYLTLNDGSQAVGRSSFYCLEYFPSQMLRTGNNFQFSYEFENVPFHSSYAHSQSLDRLMNPLIDQYLYYLSRTINGSGQNQQTLKFSVAGPSNMAVQGRNYIPGPSYRQQRVSTTVTQNNNSEFAWPGASSWALNGRNSLMNPGPAMASHKEGEDRFFPLSGSLIFGKQGTGRDNVDADKVMITNEEEIKTTNPVATESYGQVATNHQSAQQAVRTSLAQAQTGWVQNQGILPGMVWQDRDVYLQGPIWAKIPHTDGNFHPSPLMGGFGMKHPPPQILIKNTPVPADPPTAFNKDKLNSFITQYSTGQVSVEIEWELQKENSKRWNPEIQYTSNYYKSNNVEFAVNTEGVYSEPRPIGTRYLTRNL

SEQ ID NO: 9 - protein, 736 aa, Artificial Sequence
  Description of Artificial Sequence: Synthetic polypeptide
MAADGYLPDWLEDNLSEGIREWWALKPGAPQPKANQQHQDNARGLVLPGYKYLGPGNGLDKGEPVNAADAAALEHDKAYDQQLKAGDNPYLKYNHADAEFQERLKEDTSFGGNLGRAVFQAKKRLLEPLGLVEEAAKTAPGKKRPVEQSPQEPDSSAGIGKSGAQPAKKRLNFGQTGDTESVPDPQPIGEPPAAPSGVGSLTMASGGGAPVADNNEGADGVGSSSGNWHCDSQWLGDRVITTSTRTWALPTYNNHLYKQISNSTSGGSSNDNAYFGYSTPWGYFDFNRFHCHFSPRDWQRLINNNWGFRPKRLNFKLFNIQVKEVTDNNGVKTIANNLTSTVQVFTDSDYQLPYVLGSAHEGCLPPFPADVFMIPQYGYLTLNDGSQAVGRSSFYCLEYFPSQMLRTGNNFQFSYEFENVPFHSSYAHSQSLDRLMNPLIDQYLYYLSRTINGSGQNQQTLKFSVAGPSNMAVQGRNYIPGPSYRQQRVSTTVTQNNNSEFAWPGASSWALNGRNSLMNPGPAMASHKEGEDRFFPLSGSLIFGKQGTGRDNVDADKVMITNEEEIKTTNPVATESYGQVATNHQSAQAQAQTGWVQNQGILPGMVWQDRDVYLQGPIWAKIPHTDGNFHPSPLMGGFGMKHPPPQILIKNTPVPADPPTAFNKDKLNSFITQYSTGQVSVEIEWELQKENSKRWNPEIQYTSNYYKSNNVEFAVNTEGVYSEPRPIGTRYLTRNL

SEQ ID NO: 10 - DNA, 2211 bp, Artificial Sequence
  Description of Artificial Sequence: Synthetic polynucleotide
atggctgccgatggttatcttccagattggctcgaggacaacctctctgagggcattcgcgagtggtgggacttgaaacctggagccccgaagcccaaagccaaccagcaaaagcaggacgacggccggggtctggtgcttcctggctacaagtacctcggacccttcaacggactcgacaagggggagcccgtcaacgcggcggacgcagcggccctcgagcacgacaaggcctacgaccagcagctcaaagcgggtgacaatccgtacctgcggtataaccacgccgacgccgagtttcaggagcgtctgcaagaagatacgtcttttgggggcaacctcgggcgagcagtcttccaggccaagaagcgggttctcgaacctctcggtctggttgaggaaggcgctaagacggctcctggaaagaaacgtccggtagagcagtcgccacaagagccagactcctcctcgggcatcggcaagacaggccagcagcccgctaaaaagagactcaattttggtcagactggcgactcagagtcagtccccgatccacaacctctcggagaacctccagcaacccccgctgctgtgggacctactacaatggcttcaggcggtggcgcaccaatggcagacaataacgaaggcgccgacggagtgggtaatgcctcaggaaattggcattgcgattccacatggctgggcgacagagtcatcaccaccagcacccgcacctgggccttgcccacctacaataaccacctctacaagcaaatctccagtgcttcaacgggggccagcaacgacaaccactacttcggctacagcaccccctgggggtattttgatttcaacagattccactgccacttttcaccacgtgactggcagcgactcatcaacaacaattggggattccggcccaagagactcaacttcaaactcttcaacatccaagtcaaggaggtcacgacgaatgatggcgtcacaaccatcgctaataaccttaccagcacggttcaagtcttctcggactcggagtaccagcttccgtacgtcctcggctctgcgcaccagggctgcctccctccgttcccggcggacgtgttcatgattccgcaatacggctacctgacgctcaacaatggcagccaagccgtgggacgttcatccttttactgcctggaatatttcccttctcagatgctgagaacgggcaacaactttaccttcagctacacctttgaggaagtgcctttccacagcagctacgcgcacagccagagcctggaccggctgatgaatcctctcatcgaccaatacctgtattacctgaacagaactcaaaatcagtccggaagtgcccaaaacaaggacttgctgtttagccgtgggtctccagctggcatgtctgttcagcccaaaaactggctacctggaccctgttatcggcagcagcgcgtttctaaaacaaaaacagacaacaacaacagcaattttacctggactggtgcttcaaaatataacctcaatgggcgtgaatccatcatcaaccctggcactgctatggcctcacacaaagacgacgaagacaagttctttcccatgagcggtgtcatgatttttggaaaagagagcgccggagcttcaaacactgcattggacaatgtcatgattacagacgaagaggaaattaaagccactaaccctgtggccaccgaaagatttgggaccgtggcagtcaatttccagagcagcagcacagaccctgcgaccggagatgtgcatgctatgggagcattacctggcatggtgtggcaagatagagacgtgtacctgcagggtcccatttgggccaaaattcctcacacagatggacactttcacccgtctcctcttatgggcggctttggactcaagaacccgcctcctcagatcctcatcaaaaacacgcctgttcctgcgaatcctccggcggagttttcagctacaaagtttgcttcattcatcacccaatactccacaggacaagtgagtgtggaaattgaatgggagctgcagaaagaaaacagcaagcgctggaatcccgaagtgcagtacacatccaattatgcaaaatctgccaacgttgattttactgtggacaacaatggactttatactgagcctcgccccattggcacccgttaccttacccgtcccctgtaa

SEQ ID NO: 11 - protein, 736 aa, Adeno-associated virus 1
MAADGYLPDWLEDNLSEGIREWWDLKPGAPKPKANQQKQDDGRGLVLPGYKYLGPFNGLDKGEPVNAADAAALEHDKAYDQQLKAGDNPYLRYNHADAEFQERLQEDTSFGGNLGRAVFQAKKRVLEPLGLVEEGAKTAPGKKRPVEQSPQEPDSSSGIGKTGQQPAKKRLNFGQTGDSESVPDPQPLGEPPATPAAVGPTTMASGGGAPMADNNEGADGVGNASGNWHCDSTWLGDRVITTSTRTWALPTYNNHLYKQISSASTGASNDNHYFGYSTPWGYFDFNRFHCHFSPRDWQRLINNNWGFRPKRLNFKLFNIQVKEVTTNDGVTTIANNLTSTVQVFSDSEYQLPYVLGSAHQGCLPPFPADVFMIPQYGYLTLNNGSQAVGRSSFYCLEYFPSQMLRTGNNFTFSYTFEEVPFHSSYAHSQSLDRLMNPLIDQYLYYLNRTQNQSGSAQNKDLLFSRGSPAGMSVQPKNWLPGPCYRQQRVSKTKTDNNNSNFTWTGASKYNLNGRESIINPGTAMASHKDDEDKFFPMSGVMIFGKESAGASNTALDNVMITDEEEIKATNPVATERFGTVAVNFQSSSTDPATGDVHAMGALPGMVWQDRDVYLQGPIWAKIPHTDGHFHPSPLMGGFGLKNPPPQILIKNTPVPANPPAEFSATKFASFITQYSTGQVSVEIEWELQKENSKRWNPEVQYTSNYAKSANVDFTVDNNGLYTEPRPIGTRYLTRPL

SEQ ID NO: 12 - DNA, 4718 bp, Adeno-associated virus serotype 1
ttgcccactccctctctgcgcgctcgctcgctcggtggggcctgcggaccaaaggtccgcagacggcagagctctgctctgccggccccaccgagcgagcgagcgcgcagagagggagtgggcaactccatcactaggggtaatcgcgaagcgcctcccacgctgccgcgtcagcgctgacgtaaattacgtcataggggagtggtcctgtattagctgtcacgtgagtgcttttgcgacattttgcgacaccacgtggccatttagggtatatatggccgagtgagcgagcaggatctccattttgaccgcgaaatttgaacgagcagcagccatgccgggcttctacgagatcgtgatcaaggtgccgagcgacctggacgagcacctgccgggcatttctgactcgtttgtgagctgggtggccgagaaggaatgggagctgcccccggattctgacatggatctgaatctgattgagcaggcacccctgaccgtggccgagaagctgcagcgcgacttcctggtccaatggcgccgcgtgagtaaggccccggaggccctcttctttgttcagttcgagaagggcgagtcctacttccacctccatattctggtggagaccacgggggtcaaatccatggtgctgggccgcttcctgagtcagattagggacaagctggtgcagaccatctaccgcgggatcgagccgaccctgcccaactggttcgcggtgaccaagacgcgtaatggcgccggaggggggaacaaggtggtggacgagtgctacatccccaactacctcctgcccaagactcagcccgagctgcagtgggcgtggactaacatggaggagtatataagcgcctgtttgaacctggccgagcgcaaacggctcgtggcgcagcacctgacccacgtcagccagacccaggagcagaacaaggagaatctgaaccccaattctgacgcgcctgtcatccggtcaaaaacctccgcgcgctacatggagctggtcgggtggctggtggaccggggcatcacctccgagaagcagtggatccaggaggaccaggcctcgtacatctccttcaacgccgcttccaactcgcggtcccagatcaaggccgctctggacaatgccggcaagatcatggcgctgaccaaatccgcgcccgactacctggtaggccccgctccgcccgcggacattaaaaccaaccgcatctaccgcatcctggagctgaacggctacgaacctgcctacgccggctccgtctttctcggctgggcccagaaaaggttcgggaagcgcaacaccatctggctgtttgggccggccaccacgggcaagaccaacatcgcggaagccatcgcccacgccgtgcccttctacggctgcgtcaactggaccaatgagaactttcccttcaatgattgcgtcgacaagatggtgatctggtgggaggagggcaagatgacggccaaggtcgtggagtccgccaaggccattctcggcggcagcaaggtgcgcgtggaccaaaagtgcaagtcgtccgcccagatcgaccccacccccgtgatcgtcacctccaacaccaacatgtgcgccgtgattgacgggaacagcaccaccttcgagcaccagcagccgttgcaggaccggatgttcaaatttgaactcacccgccgtctggagcatgactttggcaaggtgacaaagcaggaagtcaaagagttcttccgctgggcgcaggatcacgtgaccgaggtggcgcatgagttctacgtcagaaagggtggagccaacaaaagacccgcccccgatgacgcggataaaagcgagcccaagcgggcctgcccctcagtcgcggatccatcgacgtcagacgcggaaggagctccggtggactttgccgacaggtaccaaaacaaatgttctcgtcacgcgggcatgcttcagatgctgtttccctgcaagacatgcgagagaatgaatcagaatttcaacatttgcttcacgcacgggacgagagactgttcagagtgcttccccggcgtgtcagaatctcaaccggtcgtcagaaagaggacgtatcggaaactctgtgccattcatcatctgctggggcgggctcccgagattgcttgctcggcctgcgatctggtcaacgtggacctggatgactgtgtttctgagcaataaatgacttaaaccaggtatggctgccgatggttatcttccagattggctcgaggacaacctctctgagggcattcgcgagtggtgggacttgaaacctggagccccgaagcccaaagccaaccagcaaaagcaggacgacggccggggtctggtgcttcctggctacaagtacctcggacccttcaacggactcgacaagggggagcccgtcaacgcggcggacgcagcggccctcgagcacgacaaggcctacgaccagcagctcaaagcgggtgacaatccgtacctgcggtataaccacgccgacgccgagtttcaggagcgtctgcaagaagatacgtcttttgggggcaacctcgggcgagcagtcttccaggccaagaagcgggttctcgaacctctcggtctggttgaggaaggcgctaagacggctcctggaaagaaacgtccggtagagcagtcgccacaagagccagactcctcctcgggcatcggcaagacaggccagcagcccgctaaaaagagactcaattttggtcagactggcgactcagagtcagtccccgatccacaacctctcggagaacctccagcaacccccgctgctgtgggacctactacaatggcttcaggcggtggcgcaccaatggcagacaataacgaaggcgccgacggagtgggtaatgcctcaggaaattggcattgcgattccacatggctgggcgacagagtcatcaccaccagcacccgcacctgggccttgcccacctacaataaccacctctacaagcaaatctccagtgcttcaacgggggccagcaacgacaaccactacttcggctacagcaccccctgggggtattttgatttcaacagattccactgccacttttcaccacgtgactggcagcgactcatcaacaacaattggggattccggcccaagagactcaacttcaaactcttcaacatccaagtcaaggaggtcacgacgaatgatggcgtcacaaccatcgctaataaccttaccagcacggttcaagtcttctcggactcggagtaccagcttccgtacgtcctcggctctgcgcaccagggctgcctccctccgttcccggcggacgtgttcatgattccgcaatacggctacctgacgctcaacaatggcagccaagccgtgggacgttcatccttttactgcctggaatatttcccttctcagatgctgagaacgggcaacaactttaccttcagctacacctttgaggaagtgcctttccacagcagctacgcgcacagccagagcctggaccggctgatgaatcctctcatcgaccaatacctgtattacctgaacagaactcaaaatcagtccggaagtgcccaaaacaaggacttgctgtttagccgtgggtctccagctggcatgtctgttcagcccaaaaactggctacctggaccctgttatcggcagcagcgcgtttctaaaacaaaaacagacaacaacaacagcaattttacctggactggtgcttcaaaatataacctcaatgggcgtgaatccatcatcaaccctggcactgctatggcctcacacaaagacgacgaagacaagttctttcccatgagcggtgtcatgatttttggaaaagagagcgccggagcttcaaacactgcattggacaatgtcatgattacagacgaagaggaaattaaagccactaaccctgtggccaccgaaagatttgggaccgtggcagtcaatttccagagcagcagcacagaccctgcgaccggagatgtgcatgctatgggagcattacctggcatggtgtggcaagatagagacgtgtacctgcagggtcccatttgggccaaaattcctcacacagatggacactttcacccgtctcctcttatgggcggctttggactcaagaacccgcctcctcagatcctcatcaaaaacacgcctgttcctgcgaatcctccggcggagttttcagctacaaagtttgcttcattcatcacccaatactccacaggacaagtgagtgtggaaattgaatgggagctgcagaaagaaaacagcaagcgctggaatcccgaagtgcagtacacatccaattatgcaaaatctgccaacgttgattttactgtggacaacaatggactttatactgagcctcgccccattggcacccgttaccttacccgtcccctgtaattacgtgttaatcaataaaccggttgattcgtttcagttgaactttggtctcctgtccttcttatcttatcggttaccatggttatagcttacacattaactgcttggttgcgcttcgcgataaaagacttacgtcatcgggttacccctagtgatggagttgcccactccctctctgcgcgctcgctcgctcggtggggcctgcggaccaaaggtccgcagacggcagagctctgctctgccggccccaccgagcgagcgagcgcgcagagagggagtgggcaa

SEQ ID NO: 13 - DNA, 3131 bp, Artificial Sequence
  Description of Artificial Sequence: Synthetic polynucleotide
gcggccgcgaattcgcccttggctgcgtcaactggaccaatgagaactttcccttcaatgattgcgtcgacaagatggtgatctggtgggaggagggcaagatgacggccaaggtcgtggagtccgccaaggccattctcggcggcagcaaggtgcgcgtggaccaaaagtgcaagtcgtccgcccagatcgaccccacccccgtgatcgtcacctccaacaccaacatgtgcgccgtgattgacgggaacagcaccaccttcgagcaccagcagcctctccaggaccggatgtttaagttcgaactcacccgccgtctggagcacgactttggcaaggtgacaaagcaggaagtcaaagagttcttccgctgggccagtgatcacgtgaccgaggtggcgcatgagttttacgtcagaaagggcggagccagcaaaagacccgcccccgatgacgcggataaaagcgagcccaagcgggcctgcccctcagtcgcggatccatcgacgtcagacgcggaaggagctccggtggactttgccgacaggtaccaaaacaaatgttctcgtcacgcgggcatgcttcagatgctgtttccctgcaaaacgtgcgagagaatgaatcggaatttcaacatttgcttcacacacggggtcagagactgctcagagtgtttccccggcgtgtcagaatctcaaccggtcgtcagaaagaggacgtatcggaaactccgtgcgattcatcatctgctggggcgggctcccgagattgcttgctcggcctgcgatctggtcaacgtggacctggatgactgtgtttctgagcaataaatgacttaaaccaggtatggctgccgatggttatcttccagattggctcgaggacaacctctctgagggcattcgcgagtggtgggcgctgaaacctggagccccgaagcccaaagccaaccagcaaaagcaggacgacggccggggtctggtgcttcctggctacaagtacctcggacccttcaacggactcgacaagggggagcccgtcaacgcggcggacgcagcggccctcgagcacgacaaggcttacgaccagcagctgcaggcgggtgacaatccgtacctgcggtataaccacgccgacgccgagtttcaggagcgtctgcaagaagatacgtcttttgggggcaacctcgggcgagcagtcttccaggccaagaagcgggttctcgaacctctcggtctggttgaggaaggcgctaagacggctcctggaaagaagagaccggtagagccatcaccccagcgttctccagactcctctacgggcatcggcaagaaaggccaacagcccgccagaaaaagactcaattttggtcagactggcgactcagagtcagttccagaccctcaacctctcggagaacctccagcagcgccctctggtgtgggacctaatacaatggctgcaggcggtggcgcaccaatggcagacaataacgaaggcgccgacggagtgggtagttcctcgggaaattggcattgcgattccacatggctgggcgacagagtcatcaccaccagcacccgaacctgggccctgcccacctacaacaaccacctctacaagcaaatctccaacgggacatcgggaggagccaccaacgacaacacctacttcggctacagcaccccctgggggtattttgactttaacagattccactgccacctttcaccacgtgactggcagcgactcatcaacaacaactggggattccgacccaagagactcagcttcaagctcttcaacatccaggtcaaggaggtcacgcagaatgaaggcaccaagaccatcgccaataacctcaccagcaccatccaggtgtttacggactcggagtaccagctgccgtacgttctcggctctgtccaccagggctgcctgcctccgttcccggcggacgtgttcatgattccccagtacggctacctaacactcaacaacggtagtcaggccgtgggacgctcctccttctactgcctggaatactttccttcgcagatgctgagaaccggcaacaacttccagtttacttacaccttcgaggacgtgcctttccacagcagctacgcccacagctagagcttggaccggctgatgaatcctctgattgaccagtacctgtactacttgtctcggactcaaacaacaggaggcacggcaaatacgcagactctgggcttcagccaaggtgggcctaatacaatggccaatcaggcaaagaactggctgccaggaccctgttaccgccaacaacgcgtctcaacgacaaccgggcaaaacaacaatagcaactttgcctggactgctgggaccaaataccatctgaatggaagaaattcattggctaatcctggcatcgctatggcaacacacaaagacgacgaggagcgtttttttcccagtaacgggatcctgatttttggcaaacaaaatgctgccagagacaatgcggattacagcgatgtcatgctcaccagcgaggaagaaatcaaaaccactaaccctgtggctacagaggaatacggtatcgtggcagataacttgcagcagcaaaacacggctcctcaaattggaactgtcaacagccagggggccttacccggtatggtctggcagaaccgggacgtgtacctgcagggtcccatctgggccaagattcctcacacggacggcaacttccacccgtctccgctgatgggcggctttggcctgaaacatcctccgcctcagatcctgatcaagaacacgcctgtacctgcggatcctccgaccaccttcaaccagtcaaagctgaactctttcatcacgcaatacagcaccggacaggtcagcgtggaaattgaatgggagctgcagaaggaaaacagcaagcgctggaaccccgagatccagtacacctccaactactacaaatctataagtgtggactttgctgttaatacagaaggcgtgtactctgaaccccgccccattggcacccgttacctcacccgtaatctgtaattgcctgttaatcaataaaccggttgattcgtttcagttgaactttggtctctgcgaagggcgaattc

SEQ ID NO: 14 - DNA, 255 bp, Adeno-associated virus serotype 10
ggtaattcctccggaaattggcattgcgattccacatggctgggcgacagagtcatcaccaccagcacccgaacctgggtcctgcccacctacaacaaccacatctacaagcaaatctccagcgagacaggagccaccaacgacaaccactacttcggctacagcaccccctgggggtattttgactttaacagattccactgccacttttcaccacgtgactggcagcgactcatcaacaacaactggggattc

SEQ ID NO: 15 - protein, 738 aa, Adeno-associated virus 10
MAADGYLPDWLEDNLSEGIREWWDLKPGAPKPKANQQKQDDGRGLVLPGYKYLGPFNGLDKGEPVNAADAAALEHDKAYDQQLKAGDNPYLRYNHADAEFQERLQEDTSFGGNLGRAVFQAKKRVLEPLGLVEEAAKTAPGKKRPVEPSPQRSPDSSTGIGKKGQQPAKKRLNFGQTGESESVPDPQPIGEPPAGPSGLGSGTMAAGGGAPMADNNEGADGVGSSSGNWHCDSTWLGDRVITTSTRTWALPTYNNHLYKQISNGTSGGSTNDNTYFGYSTPWGYFDFNRFHCHFSPRDWQRLINNNWGFRPKRLSFKLFNIQVKEVTQNEGTKTIANNLTSTIQVFTDSEYQLPYVLGSAHQGCLPPFPADVFMIPQYGYLTLNNGSQAVGRSSFYCLEYFPSQMLRTGNNFEFSYTFEDVPFHSSYAHSQSLDRLMNPLIDQYLYYLSRTQSTGGTQGTQQLLFSQAGPANMSAQAKNWLPGPCYRQQRVSTTLSQNNNSNFAWTGATKYHLNGRDSLVNPGVAMATHKDDEERFFPSSGVLMFGKQGAGRDNVDYSSVMLTSEEEIKTTNPVATEQYGVVADNLQQANTGPIVGNVNSQGALPGMVWQNRDVYLQGPIWAKIPHTDGNFHPSPLMGGFGLKHPPPQILIKNTPVPADPPTTFSQAKLASFITQYSTGQVSVEIEWELQKENSKRWNPEIQYTSNYYKSTNVDFAVNTEGTYSEPRPIGTRYLTRNL

SEQ ID NO: 16 - protein, 738 aa, Adeno-associated virus 10
MAADGYLPDWLEDNLSEGIREWWDLKPGAPKPKANQQKQDDGRGLVLPGYKYLGPFNGLDKGEPVNAADAAALEHDKAYDQQLKAGDNPYLRYNHADAEFQERLQEDTSFGGNLGRAVFQAKKRVLEPLGLVEEGAKTAPGKKRPVEPSPQRSPDSSTGIGKKGQQPAKKRLNFGQTGDSESVPDPQPIGEPPAGPSGLGSGTMAAGGGAPMADNNEGADGVGSSSGNWHCDSTWLGDRVITTSTRTWALPTYNNHLYKQISNGTSGGSTNDNTYFGYSTPWGYFDFNRFHCHFSPRDWQRLINNNWGFRPKRLNFKLFNIQVKEVTQNEGTKTIANNLTSTIQVFTDSEYQLPYVLGSAHQGCLPPFPADVFMIPQYGYLTLNNGSQAVGRSSFYCLEYFPSQMLRTGNNFEFSYQFEDVPFHSSYAHSQSLDRLMNPLIDQYLYYLSRTQSTGGTAGTQQLLFSQAGPNNMSAQAKNWLPGPCYRQQRVSTTLSQNNNSNFAWTGATKYHLNGRDSLVNPGVAMATHKDDEERFFPSSGVLMFGKQGAGKDNVDYSSVMLTSEEEIKTTNPVATEQYGVVADNLQQQNAAPIVGAVNSQGALPGMVWQNRDVYLQGPIWAKIPHTDGNFHPSPLMGGFGLKHPPPQILIKNTPVPADPPTTFSQAKLASFITQYSTGQVSVEIEWELQKENSKRWNPEIQYTSNYYKSTNVDFAVNTDGTYSEPRPIGTRYLTRNL

SEQ ID NO: 17 - DNA, 258 bp, Adeno-associated virus serotype 11
ggtaattcctccggaaattggcattgcgattccacatggctgggcgacagagtcatcaccaccagcacccgaacctgggccctgccaacctacaacaaccacctctacaaacaaatctccagcgcttcaacgggggccagcaacgacaaccactactttggctacagcaccccctgggggtattttgactttaacagattccactgccacttctcaccacgtgactggcagcgactcatcaacaacaactggggattc

SEQ ID NO: 18 - DNA, 255 bp, Adeno-associated virus serotype 12
ggtaattcctccggaaattggcattgcgattccacatggctgggcgaccgagtcattaccaccagcacccggacttgggccctgcccacctacaacaaccacctctacaagcaaatctccagccaatcgggtgccaccaacgacaaccactacttcggctacagcaccccttgggggtattttgatttcaacagattccactgccatttctcaccacgtgactggcagcgactcatcaacaacaactggggattc

SEQ ID NO: 19 - DNA, 2208 bp, Adeno-associated virus serotype 2
atggctgccgatggttatcttccagattggctcgaggacactctctctgaaggaataagacagtggtggaagctcaaacctggcccaccaccaccaaagcccgcagagcggcataaggacgacagcaggggtcttgtgcttcctgggtacaagtacctcggacccttcaacggactcgacaagggagagccggtcaacgaggcagacgccgcggccctcgagcacgacaaagcctacgaccggcagctcgacagcggagacaacccgtacctcaagtacaaccacgccgacgcggagtttcaggagcgccttaaagaagatacgtcttttgggggcaacctcggacgagcagtcttccaggcgaaaaagagggttcttgaacctctgggcctggttgaggaacctgttaagacggctccgggaaaaaagaggccggtagagcactctcctgtggagccagactcctcctcgggaaccggaaaggcgggccagcagcctgcaagaaaaagattgaattttggtcagactggagacgcagactcagtacctgacccccagcctctcggacagccaccagcagccccctctggtctgggaactaatacgatggctacaggcagtggcgcaccaatggcagacaataacgagggcgccgacggagtgggtaattcctcgggaaattggcattgcgattccacatggatgggcgacagagtcatcaccaccagcacccgaacctgggccctgcccacctacaacaaccacctctacaaacaaatttccagccaatcaggagcctcgaacgacaatcactactttggctacagcaccccttgggggtattttgacttcaacagattccactgccacttttcaccacgtgactggcaaagactcatcaacaacaactggggattccgacccaagagactcaacttcaagctctttaacattcaagtcaaagaggtcacgcagaatgacggtacgacgacgattgccaataaccttaccagcacggttcaggtgtttactgactcggagtaccagctcccgtacgtcctcggctcggcgcatcaaggatgcctcccgccgttcccagcagacgtcttcatggtgccacagtatggatacctcaccctgaacaacgggagtcaggcagtaggacgctcttcattttactgcctggagtactttccttctcagatgctgcgtaccggaaacaactttaccttcagctacacttttgaggacgttcctttccacagcagctacgctcacagccagagtctggaccgtctcatgaatcctctcatcgaccagtacctgtattacttgagcagaacaaacactccaagtggaaccaccacgcagtcaaggcttcagttttctcaggccggagcgagtgacattcgggaccagtctaggaactggcttcctggaccctgttaccgccagcagcgagtatcaaagacatctgcggataacaacaacagtgaatactcgtggactggagctaccaagtaccacctcaatggcagagactctctggtgaatccgggcccggccatggcaagccacaaggacgatgaagaaaagttttttcctcagagcggggttctcatctttgggaagcaaggctcagagaaaacaaatgtggacattgaaaaggtcatgattacagacgaagaggaaatcaggacaaccaatcccgtggctacggagcagtatggttctgtatctaccaacctccagagaggcaacagacaagcagctaccgcagatgtcaacacacaaggcgttcttccaggcatggtctggcaggacagagatgtgtaccttcaggggcccatctgggcaaagattccacacacggacggacattttcacccctctcccctcatgggtggattcggacttaaacaccctcctccacagattctcatcaagaacaccccggtacctgcgaatccttcgaccaccttcagtgcggcaaagtttgcttccttcatcacacagtactccacgggacaggtcagcgtggagatcgagtgggagctgcagaaggaaaacagcaaacgctggaatcccgaaattcagtacacttccaactacaacaagtctgttaatgtggactttactgtggacactaatggcgtgtattcagagcctcgccccattggcaccagatacctgactcgtaatctgtaa

SEQ ID NO: 20 - protein, 735 aa, Adeno-associated virus 2 [sequence omitted]

SEQ ID NO: 21 - protein, 621 aa, Adeno-associated virus 2
MPGFYEIVIKVPSDLDGHLPGISDSFVNWVAEKEWELPPDSDMDLNLIEQAPLTVAEKLQRDFLTEWRRVSKAPEALFFVQFEKGESYFHMHVLVETTGVKSMVLGRFLSQIREKLIQRIYRGIEPTLPNWFAVTKTRNGAGGGNKVVDECYIPNYLLPKTQPELQWAWTNMEQYLSACLNLTERKRLVAQHLTHVSQTQEQNKENQNPNSDAPVIRSKTSARYMELVGWLVDKGITSEKQWIQEDQASYISFNAASNSRSQIKAALDNAGKIMSLTKTAPDYLVGQQPVEDISSNRIYKILELNGYDPQYAASVFLGWATKKFGKRNTIWLFGPATTGKTNIAEAIAHTVPFYGCVNWTNENFPFNDCVDKMVIWWEEGKMTAKVVESAKAILGGSKVRVDQKCKSSAQIDPTPVIVTSNTNMCAVIDGNSTTFEHQQPLQDRMFKFELTRRLDHDFGKVTKQEVKDFFRWAKDHVVEVEHEFYVKKGGAKKRPAPSDADISEPKRVRESVAQPSTSDAEASINYADRYQNKCSRHVGMNLMLFPCRQCERMNQNSNICFTHGQKDCLECFPVSESQPVSVVKKAYQKLCYIHHIMGKVPDACTACDLVNVDLDDCIFEQ

SEQ ID NO: 22 - DNA, 4675 bp, Adeno-associated virus serotype 2
ttggccactccctctctgcgcgctcgctcgctcactgaggccgggcgaccaaaggtcgcccgacgcccgggctttgcccgggcggcctcagtgagcgagcgagcgcgcagagagggagtggccaactccatcactaggggttcctggaggggtggagtcgtgacgtgaattacgtcatagggttagggaggtcctgtattagaggtcacgtgagtgttttgcgacattttgcgacaccatgtggtcacgctgggtatttaagcccgagtgagcacgcagggtctccattttgaagcgggaggtttgaacgcgcagccgccatgccggggttttacgagattgtgattaaggtccccagcgaccttgacgggcatctgcccggcatttctgacagctttgtgaactgggtggccgagaaggaatgggagttgccgccagattctgacatggatctgaatctgattgagcaggcacccctgaccgtggccgagaagctgcagcgcgactttctgacggaatggcgccgtgtgagtaaggccccggaggcccttttctttgtgcaatttgagaagggagagagctacttccacatgcacgtgctcgtggaaaccaccggggtgaaatccatggttttgggacgtttcctgagtcagattcgcgaaaaactgattcagagaatttaccgcgggatcgagccgactttgccaaactggttcgcggtcacaaagaccagaaatggcgccggaggcgggaacaaggtggtggatgagtgctacatccccaattacttgctccccaaaacccagcctgagctccagtgggcgtggactaatatggaacagtatttaagcgcctgtttgaatctcacggagcgtaaacggttggtggcgcagcatctgacgcacgtgtcgcagacgcaggagcagaacaaagagaatcagaatcccaattctgatgcgccggtgatcagatcaaaaacttcagccaggtacatggagctggtcgggtggctcgtggacaaggggattacctcggagaagcagtggatccaggaggaccaggcctcatacatctccttcaatgcggcctccaactcgcggtcccaaatcaaggctgccttggacaatgcgggaaagattatgagcctgactaaaaccgcccccgactacctggtgggccagcagcccgtggaggacatttccagcaatcggatttataaaattttggaactaaacgggtacgatccccaatatgcggcttccgtctttctgggatgggccacgaaaaagttcggcaagaggaacaccatctggctgtttgggcctgcaactaccgggaagaccaacatcgcggaggccatagcccacactgtgcccttctacgggtgcgtaaactggaccaatgagaactttcccttcaacgactgtgtcgacaagatggtgatctggtgggaggaggggaagatgaccgccaaggtcgtggagtcggccaaagccattctcggaggaagcaaggtgcgcgtggaccagaaatgcaagtcctcggcccagatagacccgactcccgtgatcgtcacctccaacaccaacatgtgcgccgtgattgacgggaactcaacgaccttcgaacaccagcagccgttgcaagaccggatgttcaaatttgaactcacccgccgtctggatcatgactttgggaaggtcaccaagcaggaagtcaaagactttttccggtgggcaaaggatcacgtggttgaggtggagcatgaattctacgtcaaaaagggtggagccaagaaaagacccgcccccagtgacgcagatataagtgagcccaaacgggtgcgcgagtcagttgcgcagccatcgacgtcagacgcggaagcttcgatcaactacgcagacaggtaccaaaacaaatgttctcgtcacgtgggcatgaatctgatgctgtttccctgcagacaatgcgagagaatgaatcagaattcaaatatctgcttcactcacggacagaaagactgtttagagtgctttcccgtgtcagaatctcaacccgtttctgtcgtcaaaaaggcgtatcagaaactgtgctacattcatcatatcatgggaaaggtgccagacgcttgcactgcctgcgatctggtcaatgtggatttggatgactgcatctttgaacaataaatgatttaaatcaggtatggctgccgatggttatcttccagattggctcgaggacactctctctgaaggaataagacagtggtggaagctcaaacctggcccaccaccaccaaagcccgcagagcggcataaggacgacagcaggggtcttgtgcttcctgggtacaagtacctcggacccttcaacggactcgacaagggagagccggtcaacgaggcagacgccgcggccctcgagcacgtacaaagcctacgaccggcagctcgacagcggagacaacccgtacctcaagtacaaccacgccgacgcggagtttcaggagcgccttaaagaagatacgtcttttgggggcaacctcggacgagcagtcttccaggcgaaaaagagggttcttgaacctctgggcctggttgaggaacctgttaagacggctccgggaaaaaagaggccggtagagcactctcctgtggagccagactcctcctcgggaaccggaaaggcgggccagcagcctgcaagaaaaagattgaattttggtcagactggagacgcagactcagtacctgacccccagcctctcggacagccaccagcagccccctctggtctgggaactaatacgatggctacaggcagtggcgcaccaatggcagacaataacgagggcgccgacggagtgggtaattcctccggaaattggcattgcgattccacatggatgggcgacagagtcatcaccaccagcacccgaacctgggccctgcccacctacaacaaccacctctacaaacaaatttccagccaatcaggagcctcgaacgacaatcactactttggctacagcaccccttgggggtattttgacttcaacagattccactgccacttttcaccacgtgactggcaaagactcatcaacaacaactggggattccgacccaagagactcaacttcaagctctttaacattcaagtcaaagaggtcacgcagaatgacggtacgacgacgattgccaataaccttaccagcacggttcaggtgtttactgactcggagtaccagctcccgtacgtcctcggctcggcgcatcaaggatgcctcccgccgttcccagcagacgtcttcatggtgccacagtatggatacctcaccctgaacaacgggagtcaggcagtaggacgctcttcattttactgcctggagtactttccttctcagatgctgcgtaccggaaacaactttaccttcagctacacttttgaggacgttcctttccacagcagctacgctcacagccagagtctggaccgtctcatgaatcctctcatcgaccagtacctgtattacttgagcagaacaaacactccaagtggaaccaccacgcagtcaaggcttcagttttctcaggccggagcgagtgacattcgggaccagtctaggaactggcttcctggaccctgttaccgccagcagcgagtatcaaagacatctgcggataacaacaacagtgaatactcgtggactggagctaccaagtaccacctcaatggcagagactctctggtgaatccggccatggcaagccacaaggacgatgaagaaaagttttttcctcagagcggggttctcatctttgggaagcaaggctcagagaaaacaaatgtgaacattgaaaaggtcatgattacagacgaagaggaaatcggaacaaccaatcccgtggctacggagcagtatggttctgtatctaccaacctccagagaggcaacagacaagcagctaccgcagatgtcaacacacaaggcgttcttccaggcatggtctggcaggacagagatgtgtaccttcaggggcccatctgggcaaagattccacacacggacggacattttcacccctctcccctcatgggtggattcggacttaaacaccctcctccacagattctcatcaagaacaccccggtacctgcgaatccttcgaccaccttcagtgcggcaaagtttgcttccttcatcacacagtactccacgggacacggtcagcgtggagatcgagtgggagctgcagaaggaaaacagcaaacgctggaatcccgaaattcagtacacttccaactacaacaagtctgttaatcgtggacttaccgtggatactaatggcgtgtattcagagcctcgccccattggcaccagatacctgactcgtaatctgtaattgcttgttaatcaataaaccgtttaattcgtttcagttgaactttggtctctgcgtatttctttcttatctagtttccatggctacgtagataagtagcatggcgggttaatcattaactacaaggaacccctagtgatggagttggccactccctctctgcgcgctcgctcgctcactgaggccgggcgaccaaaggtcgcccgacgcccgggctttgcccgggcggcctcagtgagcgagcgagcgcgcagagagggagtggccaa

SEQ ID NO: 23 - DNA, 4679 bp, Adeno-associated virus 2
ttggccactccctctctgcgcgctcgctcgctcactgaggccgggcgaccaaaggtcgcccgacgcccgggctttgcccgggcggcctcagtgagcgagcgagcgcgcagagagggagtggccaactccatcactaggggttcctggaggggtggagtcgtgacgtgaattacgtcatagggttagggaggtcctgtattagaggtcacgtgagtgttttgcgacattttgcgacaccatgtggtcacgctgggtatttaagcccgagtgagcacgcagggtctccattttgaagcgggaggtttgaacgcgcagccgccatgccggggttttacgagattgtgattaaggtccccagcgaccttgacgggcatctgcccggcatttctgacagctttgtgaactgggtggccgagaaggaatgggagttgccgccagattctgacatggatctgaatctgattgagcaggcacccctgaccgtggccgagaagctgcagcgcgactttctgacggaatggcgccgtgtgagtaaggccccggaggcccttttctttgtgcaatttgagaagggagagagctacttccacatgcacgtgctcgtggaaaccaccggggtgaaatccatggttttgggacgtttcctgagtcagattcgcgaaaaactgattcagagaatttaccgcgggatcgagccgactttgccaaactggttcgcggtcacaaagaccagaaatggcgccggaggcgggaacaaggtggtggatgagtgctacatccccaattacttgctccccaaaacccagcctgagctccagtgggcgtggactaatatggaacagtatttaagcgcctgtttgaatctcacggagcgtaaacggttggtggcgcagcatctgacgcacgtgtcgcagacgcaggagcagaacaaagagaatcagaatcccaattctgatgcgccggtgatcagatcaaaaacttcagccaggtacatggagctggtcgggtggctcgtggacaaggggattacctcggagaagcagtggatccaggaggaccaggcctcatacatctccttcaatgcggcctccaactcgcggtcccaaatcaaggctgccttggacaatgcgggaaagattatgagcctgactaaaaccgcccccgactacctggtgggccagcagcccgtggaggacatttccagcaatcggatttataaaattttggaactaaacgggtacgatccccaatatgcggcttccgtctttctgggatgggccacgaaaaagttcggcaagaggaacaccatctggctgtttgggcctgcaactaccgggaagaccaacatcgcggaggccatagcccacactgtgcccttctacgggtgcgtaaactggaccaatgagaactttcccttcaacgactgtgtcgacaagatggtgatctggtgggaggaggggaagatgaccgccaaggtcgtggagtcggccaaagccattctcggaggaagcaaggtgcgcgtggaccagaaatgcaagtcctcggcccagatagacccgactcccgtgatcgtcacctccaacaccaacatgtgcgccgtgattgacgggaactcaacgaccttcgaacaccagcagccgttgcaagaccggatgttcaaatttgaactcacccgccgtctggatcatgactttgggaaggtcaccaagcaggaagtcaaagactttttccggtgggcaaaggatcacgtggttgaggtggagcatgaattctacgtcaaaaagggtggagccaagaaaagacccgcccccagtgacgcagatataagtgagcccaaacgggtgcgcgagtcagttgcgcagccatcgacgtcagacgcggaagcttcgatcaactacgcagacaggtaccaaaacaaatgttctcgtcacgtgggcatgaatctgatgctgtttccctgcagacaatgcgagagaatgaatcagaattcaaatatctgcttcactcacggacagaaagactgtttagagtgctttcccgtgtcagaatctcaacccgtttctgtcgtcaaaaaggcgtatcagaaactgtgctacattcatcatatcatgggaaaggtgccagacgcttgcactgcctgcgatctggtcaatgtggatttggatgactgcatctttgaacaataaatgatttaaatcaggtatggctgccgatggttatcttccagattggctcgaggacactctctctgaaggaataagacagtggtggaagctcaaacctggcccaccaccaccaaagcccgcagagcggcataaggacgacagcaggggtcttgtgcttcctgggtacaagtacctcggacccttcaacggactcgacaagggagagccggtcaacgaggcagacgccgcggccctcgagcacgacaaagcctacgaccggcagctcgacagcggagacaacccgtacctcaagtacaaccacgccgacgcggagtttcaggagcgccttaaagaagatacgtcttttgggggcaacctcggacgagcagtcttccaggcgaaaaagagggttcttgaacctctgggcctggttgaggaacctgttaagacggctccgggaaaaaagaggccggtagagcactctcctgtggagccagactcctcctcgggaaccggaaaggcgggccagcagcctgcaagaaaaagattgaattttggtcagactggagacgcagactcagtacctgacccccagcctctcggacagccaccagcagccccctctggtctgggaactaatacgatggctacaggcagtggcgcaccaatggcagacaataacgagggcgccgacggagtgggtaattcctccggaaattggcattgcgattccacatggatgggcgacagagtcatcaccaccagcacccgaacctgggccctgcccacctacaacaaccacctctacaaacaaatttccagccaatcaggagcctcgaacgacaatcactactttggctacagcaccccttgggggtattttgacttcaacagattccactgccacttttcaccacgtgactggcaaagactcatcaacaacaactggggattccgacccaagagactcaacttcaagctctttaacattcaagtcaaagaggtcacgcagaatgacggtacgacgacgattgccaataaccttaccagcacggttcaggtgtttactgactcggagtaccagctcccgtacgtcctcggctcggcgcatcaaggatgcctcccgccgttcccagcagacgtcttcatggtgccacagtatggatacctcaccctgaacaacgggagtcaggcagtaggacgctcttcattttactgcctggagtactttccttctcagatgctgcgtaccggaaacaactttaccttcagctacacttttgaggacgttcctttccacagcagctacgctcacagccagagtctggaccgtctcatgaatcctctcatcgaccagtacctgtattacttgagcagaacaaacactccaagtggaaccaccacgcagtcaaggcttcagttttctcaggccggagcgagtgacattcgggaccagtctaggaactggcttcctggaccctgttaccgccagcagcgagtatcaaagacatctgcggataacaacaacagtgaatactcgtggactggagctaccaagtaccacctcaatggcagagactctctggtgaatccgggcccggccatggcaagccacaaggacgatgaagaaaagttttttcctcagagcggggttctcatctttgggaagcaaggctcagagaaaacaaatgtggacattgaaaaggtcatgattacagacgaagaggaaatcaggacaaccaatcccgtggctacggagcagtatggttctgtatctaccaacctccagagaggcaacagacaagcagctaccgcagatgtcaacacacaaggcgttcttccaggcatggtctggcaggacagagatgtgtaccttcaggggcccatctgggcaaagattccacacacggacggacattttcacccctctcccctcatgggtggattcggacttaaacaccctcctccacagattctcatcaagaacaccccggtacctgcgaatccttcgaccaccttcagtgcggcaaagtttgcttccttcatcacacagtactccacgggacaggtcagcgtggagatcgagtgggagctgcagaaggaaaacagcaaacgctggaatcccgaaattcagtacacttccaactacaacaagtctgttaatgtggactttactgtggacactaatggcgtgtattcagagcctcgccccattggcaccagatacctgactcgtaatctgtaattgcttgttaatcaataaaccgtttaattcgtttcagttgaactttggtctctgcgtatttctttcttatctagtttccatggctacgtagataagtagcatggcgggttaatcattaactacaaggaacccctagtgatggagttggccactccctctctgcgcgctcgctcgctcactgaggccgggcgaccaaaggtcgcccgacgcccgggctttgcccgggcggcctcagtgagcgagcgagcgcgcagagagggagtggccaa

SEQ ID NO: 24 - protein, 725 aa, Adeno-associated virus-5
MAADGYLPDWLEDTLSEGIRQWWKLKPGPPPPKPAERHKDDSRGLVLPGYKYLGPFNGLDKGEPVNEADAAALEHDKAYDRQLDSGDNPYLKYNHADAEFQERLKEDTSFGGNLGRAVFQAKKRVLEPFGLVEEGAKTAPTGKRIDDHFPKRKKARTEEDSKPSTSSDAEAGPSGSQQLQIPAQPASSLGADTMSAGGGGPLGDNNQGADGVGNASGDWHCDSTWMGDRVVTKSTRTWVLPSYNNHQYREIKSGSVDGSNANAYFGYSTPWGYFDFNRFHSHWSPRDWQRLINNYWGFRPRSLRVKIFNIQVKEVTVQDSTTTIANNLTSTVQVFTDDDYQLPYVVGNGTEGCLPAFPPQVFTLPQYGYATLNRDNTENPTERSSFFCLEYFPSKMLRTGNNFEFTYNFEEVPFHSSFAPSQNLFKLANPLVDQYLYRFVSTNNTGGVQFNKNLAGRYANTYKNWFPGPMGRTQGWNLGSGVNRASVSAFATTNRMELEGASYQVPPQPNGMTNNLQGSNTYALENTMIFNSQPANPGTTATYLEGNMLITSESETQPVNRVAYNVGGQMATNNQSSTTAPTTGTYNLQEIVPGSVWMERDVYLQGPIWAKIPETGAHFHPSPAMGGFGLKHPPPMMLIKNTPVPGNITSFSDVPVSSFITQYSTGQVTVEMEWELKKENSKRWNPEIQYTNNYNDPQFVDFAPDSTGEYRTTRPIGTRYLTRPL

SEQ ID NO: 25 - protein, 644 aa, Artificial Sequence
  Description of Artificial Sequence: Synthetic polypeptide
  MOD_RES (434)..(434): Any amino acid
KAYDQQLKAGDNPYLRYNHADAEFQERLQEDTSFGGNLGRAVFQAKKRVLEPLGLVETPAKTAPGKKRPVDSPDSTSGIGKKGQQPAKKRLNFGQTGDSESVPDPQPIGEPPAGPSGLGSGTMAAGGGAPMADNNEGADGVGNASGNWHCDSTWLGDRVITTSTRTWALPTYNNHLYKQISSQSAGSTNDNVYFGYSTPWGYFDFNRFHCHFSPRDWQRLINNNWGFRPKKLNFKLFNIQVKEVTTNDGVTTIANNLTSTVQVFSDSEYQLPYVLGSAHQGCLPPFPADVFMIPQYGYLTLNNGSQSVGRSSFYCLEYFPSQMLRTGNNFTFSYTFEDVPFHSSYAHSQSLDRLMNPLIDQYLYYLARTQSNAGGTAGNRELQFYQGGPTTMAEQAKNWLPGPCFRQQRVSKTLDQNNNSNFAWTGATKYHLNXRNSLVNPGVAMATHKDDEERFFPSSGVLIFGKTGAANKTTLENVLMTNEEEIRPTNPVATEEYGIVSSNLQAASTAAQTQVVNNQGALPGMVWQNRDVYLQGPIWAKIPHTDGNFHPSPLMGGFGLKHPPPQILIKNTPVPANPPEVFTPAKFASFITQYSTGQVSVEIEWELQKENSKRWNPEIQYTSNFDKQTGVDFAVDSQGVYSEP

SEQ ID NO: 26 - DNA, 1933 bp, Artificial Sequence
  Description of Artificial Sequence: Synthetic polynucleotide
caaggcctacgaccagcagctcaaagcgggtgacaatccgtacctgcggtataaccacgccgacgccgagtttcaggagtgtcttcaagaagatacgtcttttgggggcaacctcgggcgagcagtcttccaggccaaaaagcgggttctcgaacctcttggtctggttgagacgccagctaagacggcacctggaaagaagcgaccggtagactcgccagactccacctcgggcatcggcaagaaaggccagcagcccgcgaaaaagagactcaactttgggcagactggcgactcagagtcagtccccgaccctcaaccaatcggagaaccaccagcaggcccctctggtctgggatctggtacaatggttgcaggcggtggcgcaccaatggctgacaataacgagggcgccgacggagtgggtaatgcctcaggaaattggcattgcgattccacatggctgggcgacagagtcatcaccaccagcacccgaacctgggccctgcccacctacaacaaccacctctacaagcaaatctccagtcagtcagcagggagcaccaacgataacgtctatttcggctacagcaccccctgggggtattttgacttcaacagattccattgccacttctcaccacgtgactggcagcgacttatcaacaacaactggggattccggcccaagaagctcaacttcaagctcttcaacatccaggtcaaggaggtcacgacgaatgacggtgtcacaaccatcgctaataaccttaccagcacggttcaggtcttttcggactcggaatatcaactgccgtacgtcctcggctccgcgcaccagggctgcctgcctccgttcccggcagacgtgttcatgattccgcagtacggatacctgactctgaacaatggcagccaatcggtaggccgttcctccttctactgcctggagtactttccttctcagatgctgagaacgggcaacaacttcacctttagctacaccttcgaggacgtgcctttccacagcagctacgcgcacagccagagtctggaccggctgatgaatcccctcatcgaccagtacctgtactacttggccagaacacagagcaacgcaggaggtactgctggcaatcgggaactgcagttttatcagggcggacctaccaccatggccgaacaagcaaagaactggctgcccggaccttgcttccggcaacagagagtatccaagacgctggatcaaaataacaacagcaactttgcctggactggtgccacaaaataccatttaaatggaagaaattcattggttaatcccggtgtcgccatggcaacccacaaggacgacgaggaacgcttctccccttcgagcggagttctaatttttggcaaaactggagcagctaataaaactacattagaaaacgtgctcatgacaaatgaagaagaaattcgtcctaccaacccggtagctaccgaggaatacgggattgtaagcagcaacttgcaggcggctagcaccgcagcccagacacaagttgttaacaaccagggagccttacctggcatggtctggcagaaccgggacgtgtacctgcaaggtcccatttgggccaagattcctcacacggacggcaactttcacccgtctcctctaatgggtggctttggactgaaacacccgcctccccagatcctgatcaaaaacacgccggtacctgctaatcctccagaagtgtttactcctgccaagtttgcttccttcatcacgcagtacagcaccgggcaagtcagcgttgagatcgagtgggagctgcagaaagagaacagcaagcgctggaacccagagattcagtacacctccaactttgacaaacagactggagtggactttgctgttgacagccagggtgtttactctgagcct

SEQ ID NO: 27 - protein, 644 aa, Artificial Sequence
  Description of Artificial Sequence: Synthetic polypeptide
KAYDQQLKAGDNPYLRYNHADAEFQECLQEDTSFGGNLGRAVFQAKKRVLEPLGLVETPAKTAPGKKRPVDSPDSTSGIGKKGQQPAKKRLNFGQTGDSESVPDPQPIGEPPAGPSGLGSGTMVAGGGAPMADNNEGADGVGNASGNWHCDSTWLGDRVITTSTRTWALPTYNNHLYKQISSQSAGSTNDNVYFGYSTPWGYFDFNRFHCHFSPRDWQRLINNNWGFRPKKLNFKLFNIQVKEVTTNDGVTTIANNLTSTVQVFSDSEYQLPYVLGSAHQGCLPPFPADVFMIPQYGYLTLNNGSQSVGRSSFYCLEYFPSQMLRTGNNFTFSYTFEDVPFHSSYAHSQSLDRLMNPLIDQYLYYLARTQSNAGGTAGNRELQFYQGGPTTMAEQAKNWLPGPCFRQQRVSKTLDQNNNSNFAWTGATKYHLNGRNSLVNPGVAMATHKDDEERFSPSSGVLIFGKTGAANKTTLENVLMTNEEEIRPTNPVATEEYGIVSSNLQAASTAAQTQVVNNQGALPGMVWQNRDVYLQGPIWAKIPHTDGNFHPSPLMGGFGLKHPPPQILIKNTPVPANPPEVFTPAKFASFITQYSTGQVSVEIEWELQKENSKRWNPEIQYTSNFDKQTGVDFAVDSQGVYSEP

SEQ ID NO: 28 - DNA, 1933 bp, Artificial Sequence
  Description of Artificial Sequence: Synthetic polynucleotide
caaggcctacgaccagcagctcaaagcgggtgacaatccgtacctgcggtataaccacgccgacgccgagtttcaggagcgtcttcaagaagatacgtcttttgggggcaacctcgggcgagcagtcttccaggccaaaaagcgggttctcgaacctcttggtctggttgagacgccagctaagacggcacctggaaagaagcgaccggtagactcgccagactccacctcgggcatcggcaagaaaggccagcagcccgcgaaaaagagactcaactttgggcagactggcgactcagagccagtccccgaccctcaaccaatcggagaaccaccagcaggcccctctggtctgggatctggtacaatggctgcaggcggtggcgcaccaatggctgacaataacgagggcgccgacggagtgggtaatgcctcaggaaattggcattgcgattccacacggctgggcgacagagtcatcaccaccagcacccgaacctgggccctgcccacctacaacaaccacctctacaagcaaatctccagtcagtcagcagggagcaccaacgataacgtctatttcggctacagcaccccctgggggtattttgacttcaacagattccattgccacttctcaccacgtgactggcagcgacttatcaacaacaactggggattccggcccaagaagctcaacttcaagctcttcaacatccaggtcaaggaggtcacgacgaatgacggcgtcacaaccatcgctaataaccttaccagcacggttcaggtcttttcggactcggaatatcaactgccgtacgtcctcggctccgcgcaccagggctgcctgcctccgttcccggcagacgtgttcatgattccgcagtacggatacctgactctgaacaatggcagccaatcggtaggccgttcctccttctactgcctggagtactttccttctcagatgctgagaacgggcaacaacttcacctttagctacaccttcgaggacgtgcctttccacagcagctacgcgcacagccagagtctgggccggctgatgaatcccctcatcgaccagtacctgtactacttggccagaacacagagcaacgcaggaggtactgctggcaatcgggaactgcagttttatcagggcggacctaccaccatggccgaacaagcaaagaactggctgcccggaccttgcttccggcaacagagagtatccaagacgctggatcaaaataacaacagcaactttgcctggactggtgccacaaaataccatttaaatggaagaaattcattggttaatcccggtgtcgccatggcaacccacaaggacgacgaggaacgcttcttcccttcgagcggagttctaatttttggcaaaactggagcagctaataaaactacattagaaaacgtgctcatgacaaatgaagaagaaattcgtcctaccaacccggtagctaccgaggaatacgggattgtaagcagcaacttgcaggcggctagcaccgcagcccagacacaagttgttaacaaccagggagccttacctggcatggtctggcagaaccgggacgtgtacctgcaaggtcccatttgggccaagattcctcacacggacggcaactttcacccgtctcctctaatgggtggctttggactgaaacacccgcctccccagatcctgatcaaaaacacaccggtacctgctaatcctccagaagtgtttactcctgccaagtttgcttccttcatcacgcagtacagcaccgggcaagtcagcgttgagatcgaatgggagctgcagaaagagaacagcaagcgctggaacccagagattcagtacacctccaactttgacaaacagactggagtggactttgctgttgacagccagggtgtttactctgagcct

SEQ ID NO: 29 - protein, 644 aa, Artificial Sequence
  Description of Artificial Sequence: Synthetic polypeptide
KAYDQQLKAGDNPYLRYNHADAEFQERLQEDTSFGGNLGRAVFQAKKRVLEPLGLVETPAKTAPGKKRPVDSPDSTSGIGKKGQQPAKKRLNFGQTGDSEPVPDPQPIGEPPAGPSGLGSGTMAAGGGAPMADNNEGADGVGNASGNWHCDSTRLGDRVITTSTRTWALPTYNNHLYKQISSQSAGSTNDNVYFGYSTPWGYFDFNRFHCHFSPRDWQRLINNNWGFRPKKLNFKLFNIQVKEVTTNDGVTTIANNLTSTVQVFSDSEYQLPYVLGSAHQGCLPPFPADVFMIPQYGYLTLNNGSQSVGRSSFYCLEYFPSQMLRTGNNFTFSYTFEDVPFHSSYAHSQSLGRLMNPLIDQYLYYLARTQSNAGGTAGNRELQFYQGGPTTMAEQAKNWLPGPCFRQQRVSKTLDQNNNSNFAWTGATKYHLNGRNSLVNPGVAMATHKDDEERFFPSSGVLIFGKTGAANKTTLENVLMTNEEEIRPTNPVATEEYGIVSSNLQAASTAAQTQVVNNQGALPGMVWQNRDVYLQGPIWAKIPHTDGNFHPSPLMGGFGLKHPPPQILIKNTPVPANPPEVFTPAKFASFITQYSTGQVSVEIEWELQKENSKRWNPEIQYTSNFDKQTGVDFAVDSQGVYSEP

SEQ ID NO: 30 - DNA, 1933 bp, Artificial Sequence; identical to SEQ ID NO: 28
  Description of Artificial Sequence: Synthetic polynucleotide

SEQ ID NO: 31 - protein, 644 aa, Artificial Sequence; identical to SEQ ID NO: 29
  Description of Artificial Sequence: Synthetic polypeptide

SEQ ID NO: 32 - DNA, 1933 bp, Artificial Sequence
  Description of Artificial Sequence: Synthetic polynucleotide
caaggcctacgaccagcagctcaaagcgggtgacaatccgtacctgcggtataaccacgccgacgccgagtttcaggagcgtcttcaagaagatacgtcttttgggggcaacctcgggcgagcagtcttccaggccaaaaagcgggttctcgaacctcttggtctggttgagacgccagctaagacggcacctggaaagaagcgaccggtagactcgccagactccacctcgggcatcggcaagaaaggccagcagcccgcgaaaaagagactcaactttgggcagactggcgactcagagtcagtccccgaccctcaaccaatcggagaaccaccagcaggcccctctggtctgggatctggtacaatggctgcaggcggtggcgcaccaatggctgacaatagcgagggcgccgacggagtgggtaatgcctcaggaaattggcattgcgattccacatggctgggcgacagagtcatcaccaccagcacccgaacctgggccctgcccacctacaacaaccacctctacaagcaaatctccagtcagtcagcagggagcaccaacgataacgtctatttcggctacagcaccccctgggggtattttgacttcaacagattccattgccacttctcaccacgtgactggcagcgacttatcaacaacaactggggattccggcccaagaagctcaacttcaagctcttcaacatccaggtcaaggaggtcacgacgaatgacggtgtcacaaccatcgctaataaccttaccagcacggttcaggtcttttcggactcggaatatcaactgccgtacgtcctcggctccgcgcaccagggctgcctgcctccgttcccggcagacgtgttcatgattccgcagtacggatacctgactctgaacaatggcagccaatcggtaggccgttcctccttctactgcctggagtactttccttctcagatgctgagaacgggcaacaacttcacctttagctacaccttcgaggacgtgcctttccacagcagctacgcgcacagccagagtctggaccggctgatgaatcccctcatcgaccagtacctgtactacttggccagaacacagagcaacgcaggaggtactgctggcaatcgggaactgcagttttatcagggcggacctaccaccatggccgaacaagcaaagaactggctgcccggaccttgcttccggcaacagagagtatccaagacgctggatcaaaataacaacagcaactttgcctggactggtgccacaaaataccatttaaatggaagaaattcattggttaatcccggtgtcgccatggcaacccacaaggacgacgaggaacgcttcttcccttcgagcggagttctaatttttggcaaaactggagcagctaataaaactacattagaaaacgtgctcatgacaaatgaagaagaaattcgtcctaccaacccggtagctaccgaggaatacgggattgtaagcagcaacttgcaggcggctagcaccgcagcccagacacaagttgttaacaaccagggagccttacctggcatggtctggcagaaccgggacgtgtacctgcaaggtcccatttgggccaagattcctcacacggacggcaactttcacccgtctcctctaatgggtggctttggactgaaacacccgcctccccagatcctgatcaaaaacacaccggtacctgctaatcctccagaagtgtttactcctgccaagcttgcttccttcatcacgcagtacagcaccgggcaagtcagcgttgagatcgagtgggagctgcagaaagagaacagcaagcgctggaacccagagattcagtacacctccaactttgacaaacagactggagtggactttgctgttgacagccagggtgtttactctgagcct

SEQ ID NO: 33 - protein, 644 aa, Artificial Sequence
  Description of Artificial Sequence: Synthetic polypeptide
KAYDQQLKAGDNPYLRYNHADAEFQERLQEDTSFGGNLGRAVFQAKKRVLEPLGLVETPAKTAPGKKRPVDSPDSTSGIGKKGQQPAKKRLNFGQTGDSESVPDPQPIGEPPAGPSGLGSGTMAAGGGAPMADNSEGADGVGNASGNWHCDSTWLGDRVITTSTRTWALPTYNNHLYKQISSQSAGSTNDNVYFGYSTPWGYFDFNRFHCHFSPRDWQRLINNNWGFRPKKLNFKLFNIQVKEVTTNDGVTTIANNLTSTVQVFSDSEYQLPYVLGSAHQGCLPPFPADVFMIPQYGYLTLNNGSQSVGRSSFYCLEYFPSQMLRTGNNFTFSYTFEDVPFHSSYAHSQSLDRLMNPLIDQYLYYLARTQSNAGGTAGNRELQFYQGGPTTMAEQAKNWLPGPCFRQQRVSKTLDQNNNSNFAWTGATKYHLNGRNSLVNPGVAMATHKDDEERFFPSSGVLIFGKTGAANKTTLENVLMTNEEEIRPTNPVATEEYGIVSSNLQAASTAAQTQVVNNQGALPGMVWQNRDVYLQGPIWAKIPHTDGNFHPSPLMGGFGLKHPPPQILIKNTPVPANPPEVFTPAKLASFITQYSTGQVSVEIEWELQKENSKRWNPEIQYTSNFDKQTGVDFAVDSQGVYSEP

SEQ ID NO: 34 - DNA, 1933 bp, Artificial Sequence
  Description of Artificial Sequence: Synthetic polynucleotide
caaggcctacgaccagcagctcaaagcgggtgacaatccgtacctgcggtataaccacgccgacgccgagtttcaggagcgtcttcaagaagatacgtcttttgggggcaacctcgggcgagcagtcttccaggccaaaaagcgggttctcgaacctcttggtctggttgagacgccagctaagacggcacctggaaagaagcgaccggtagactcgccagactccacctcgggcatcggcaagaaaggccagcagcccgcgaaaaagagactcaactttgggcagactggcgactcagagtcagtccccgaccctcaaccaatcggagaaccaccagcaggcccctctggtctgggatctggtacaatggctgcaggcggtggcgcaccaatggctgacaataacgagggcgccgacggagtgggtaatgcctcaggaaattggcattgcgattccacatggctgggcgacagagtcatcaccaccagcacccgaacctgggccctgcccacctacaacaaccacctctacaagcaaatctccagtcagtcagcagggagcaccaacgataacgtctatttcggctacagcaccccctgggggtattttgacttcaacagattccattgccacttctcaccacgtgactggcagcgacttatcaacaacaactggggattccggcccaagaagctcaacttcaagctcttcaacatccaggtcaaggaggtcacgacgaatgacggcgtcacaaccatcgctaataaccttaccagcacggttcaggtcttttcggacccggaatatcaactgccgtacgtcctcggctccgcgcaccagggctgcctgcctccgttcccggcagacgtgttcatgattccgcagtacggatacctgactctgaacaatggcagccaatcggtaggccgttcctccttctactgcctggagtactttccttctcagatgctgagaacgggcaacaacttcacctttagctacaccttcgaggacgtgcctttccacagcagctacgcgcacagccagagtctggaccggctgatgaatcccctcatcgaccagtacctgtactacttggccagaacacagagcaacgcaggaggtactgctggcaatcgggaactgcagttttatcagggcggacctaccaccatggccgaacaagcaaagaactggctgcccggaccttgcttccggcaacagagagtatccaagacgctggatcaaaataacaacagcaactttgcctggactggtgccacaaaataccatttaaatggaagaaattcattggttaatcccggtgtcgccatggcaacccacaaggacgacgaggaacgcttcttcccttcgagcggagttctaatttttggcaaaactggagcagctaataaaactacattagaaaacgtgctcatgacaaatgaagaagaaattcgtcctaccaacccggtagctaccgaggaatacgggattgtaagcagcaacttgcaggcggctagcaccgcagcccagacacaagttgttaacaaccagggagccttacctggcatggtctggcagaaccgggacgtgtacctgcaaggtcccatttgggccaagattcctcacacggacggcaactttcacccgtctcctctaatgggtggctttggactgaaacacccgcctccccagatcctgatcaaaaacacaccggtacctgctaatcctccagaagtgtttactcctgccaagattgcttccttcatcacgcagtacagcaccgggcaagtcagcgttgagatcgagtgggagctgcagaaagagaacagcaagcgctggaacccagagattcagtacacctccaactttgacaaacagactggagtggactttgctgttgacagccagggtgtttactctgagcct

SEQ ID NO: 35 - protein, 644 aa, Artificial Sequence
  Description of Artificial Sequence: Synthetic polypeptide
KAYDQQLKAGDNPYLRYNHADAEFQERLQEDTSFGGNLGRAVFQAKKRVLEPLGLVETPAKTAPGKKRPVDSPDSTSGIGKKGQQPAKKRLNFGQTGDSESVPDPQPIGEPPAGPSGLGSGTMAAGGGAPMADNNEGADGVGNASGNWHCDSTWLGDRVITTSTRTWALPTYNNHLYKQISSQSAGSTNDNVYFGYSTPWGYFDFNRFHCHFSPRDWQRLINNNWGFRPKKLNFKLFNIQVKEVTTNDGVTTIANNLTSTVQVFSDPEYQLPYVLGSAHQGCLPPFPADVFMIPQYGYLTLNNGSQSVGRSSFYCLEYFPSQMLRTGNNFTFSYTFEDVPFHSSYAHSQSLDRLMNPLIDQYLYYLARTQSNAGGTAGNRELQFYQGGPTTMAEQAKNWLPGPCFRQQRVSKTLDQNNNSNFAWTGATKYHLNGRNSLVNPGVAMATHKDDEERFFPSSGVLIFGKTGAANKTTLENVLMTNEEEIRPTNPVATEEYGIVSSNLQAASTAAQTQVVNNQGALPGMVWQNRDVYLQGPIWAKIPHTDGNFHPSPLMGGFGLKHPPPQILIKNTPVPANPPEVFTPAKIASFITQYSTGQVSVEIEWELQKENSKRWNPEIQYTSNFDKQTGVDFAVDSQGVYSEP

SEQ ID NO: 36 - protein, 738 aa, Artificial Sequence
  Description of Artificial Sequence: Synthetic polypeptide
MAADGYLPDWLEDNLSEGIREWWALKPGAPKPKANQQKQDDGRGLVLPGYKYLGPFNGLDKGEPVNAADAAALEHDKAYDQQLKAGDNPYLRYNHADAEFQERLQEDTSFGGNLGRAVFQAKKRVLEPLGLVEEGAKTAPGKKRPVEPSPQRSPDSTTGIGKKGQQPAKKRLNFGQTGDSESVPDPQPIGEPPAGPSGLGSGTMAAGGGAPMADNNEGADGVGSSSGNWHCDSTWLGDRVITTSTRTWALPTYNNHLYKQISNGTSGGSTNDNTYFGYSTPWGYFDFNRFHCHFSPRDWQRLINNNWGFRPKRLNFKLFNIQVKEVTQNEGTKTIANNLTSTIQVFTDSEYQLPYVLGSARQGCLPPFPADVFMIPQYGYLTLNNGSQAVGRSSFYCLEYFPSQMLRTGNNFEFSYQFEDVPFHSSYAHSQSLDRLMNPLIDQYLYYLSRTQSTGGTAGTQQLLFSQAGPNNMSAQAKNWLPGPCYRQQRVSTTLSQNNNSNFAWTGATKYHLNGRDSLVNPGVAMATHKDDEERFFPSSGVLMFGKQGAGKGNVDYSSVMLTSEEEIKTTNPVATEQYGVVADNLQQQNAAPIVGAVNSQGALPGMVWQNRDVYLQGPIWAKIPHTDGNFHPSPLMGGFGLKHPPPQILIKNTPVPADPPTTFSQAKLASFITQYSTGQVSVEIEWELQKENSKRWNPEIQYTSNYYKSTNVDFAVNTDGTYSEPRPIGTRYLTRNL

SEQ ID NO: 37 - DNA, 3121 bp, Artificial Sequence
  Description of Artificial Sequence: Synthetic polynucleotide
gaattcgcccttctacggctgcgtcaactggaccaatgagaactttcccttcaacgactgtgtcgacaagatggtgatctggtgggaggaggggaagatgaccgccaaggtcgtggagtcggccaaagccattctcggaggaagcaaggtgcgcgtggaccagaaatgcaagtcctcggcccagatagacccgactcccgtgatcgtcacctccaacaccaacatgtgcgccgtgattgacgggaactcaacgaccttcgaacaccagcagccgttgcaagaccggatgttcaaatttgaactcacccgccgtctggatcatgactttgggaaggtcaccaagcaggaagtcaaagactttttccggtgggcaaaggatcacgtggttgaggtggagcacgaattctacgtcaaaaagggtggagccaagaaaagacccgcccccagtgacgcagatataagtgagcccaaacgggtgcgcgagtcagttgcgcagccatcgacgtcagacgcggaagcttcgatcaactacgcagacaggtaccaaaacaaatgttctcgtcacgcgggcatgaatctgatgctgtttccctgcagacaatgcgagagaatgaatcagaattcaaatatctgcttcactcacggacagaaagactgtttagagtgctttcccgtgtcagaatctcaacccgtttctgtcgtcaaaaaggcgtatcagaaactgtgctacattcatcatatcatgggaaaggtgccagacgcttgcactgcctgcgatctggtcgatgtggatttggatgactgcatctttgaacaataaatgatttaaatcaggtatggctgccgatggttatcttccagattggctcgaggacaacctctctgagggcattcgcgagtggtgggcgctgaaacctggagccccgaagcccaaagccaaccagcaaaagcaggacggcggccggggtctggtgcttcctggctacaagtacctcggacccttcaacggactcgacaagggggagcccgtcaacgcggcggacgcagcggccctcgagcacgacaaggcctacgaccagcagctcaaagcgggtgacaatccgtacctgcggtataaccacgccgacgccgagtttcaggagcgtctgcaagaagatacgtcttttgggggcaacctcgggcgagcagtcttccaggccaagaagcgggttctcgaacctctcggtctggttgaggaaggcgctaagacggctcctggaaagaagagaccggtagagccatcaccccagcgttctccagactcctctacgggcatcggcaagaaaggccagcagcccgcgaaaaagagactcaactttgggcagactggcgactcagagtcagtgcccgaccctcaaccaatcggagaaccccccgcaggcccctctggtctgggatctggtacaatggctgcaggcggtggcgctccaatggcagacaataacgaaggcgccgacggagtgggtagttcctcaggaaattggcattgcgattccacatggctgggcgactgagtcatcaccaccagcacccgaacctgggccctccccacctacaacaaccacctctacaagcaaatctccaacgggacttcgggaggaagcaccaacgacaacacctacttcggctacagcaccccctgggggtattttgactttaacagattccactgccacttctcaccacgtgactggcagcgactcatcaacaacaactggggattccggcccaagagactcaacttcaagctcttcaacatccaggtcaaggaggtcacgcagaatgaaggcaccaagaccatcgccaataaccttaccagcacgattcaggtctttacggactcggaataccagctcccgtacgtcctcggctctgcgcaccagggctgcctgcctccgttcccggcggacgtcttcatgattcctcagtacgggtacctgactctgaacaatggcagtcaggccgtgggccgttcctccttctactgcctggagtactttccttctcaaatgctgagaacgggcaacaactttgagttcagctaccagtttgaggacgtgccttttcacagcagctacgcgcacagccaaagcctggaccggctgatgaaccccctcatcgaccagtacctgtactacctgtctcggactcagtccacgggaggtaccgcaggaactcagcagttgctattttctcaggccgggcctaataacatgtcggctcaggccaaaaactggctacccgggccctgctaccggcagtaacgcgtctccacgacactgtcgcaaaataacaacagcaactttgtctggaccggtgccaccaagtatcatctgaatggcagagactctctggtagatcccggtgtcgctatggcaacccacaaggacgacgaagagcgattttttccgtccagcggagtcataatgtttgggaaacagggagctggaaaagacaacgtggactatagcagcgtcatgctaaccagtgaggaagaaattaaaaccaccaacccagtggccacagaacagtacggcgtggtggccgataacctgcaacagcaaaacgccgctcctattgtaggggccgtcaacagtcaaggagccttacctggcatggtctggcagaaccgggacgtgtacctgcagggtcctacctgggccaagattcctcacacggacggaaactttcatccctcgccgctgatgggaggctttggactgaaacacccgcctcctcagatcctgattaagaatacacctgttcccgcggatcctccaactaccttcagtcaagctaagctggcgtcgttcatcacgcagtacagcaccggacaggtcagcgtggaaattgaatgggagctgcaggaagaaaacagcaaacgctggaacccagagattcaatacacttccaactactacaaatctacaaatgtggactttgctgttaacacagatggcacttattctgagcctcgccccatcggcacccgttacctcacccgtaatctgtaattgcttgttaatcaataaaccggttgattcgtttcagttgaactttggtctctgcgaagggcgaattc

SEQ ID NO: 38 - protein, 738 aa, Artificial Sequence
  Description of Artificial Sequence: Synthetic polypeptide
MAADGYLPDWLEDNLSEGIREWWALKPGAPKPKANQQKQDDGRGLVLPGYKYLGPFNGLDKGEPVNAADAAALEHDKAYDQQLKAGDNPYLRYNHADAEFQERLQEDTSFGGNLGRAVFQAKKRVLEPLGLVEEGAKTAPGKKRPVEPSPQRSPDSSTGIGKKGQQPAKKRLNFGQTGDSESVPDPQPIGEPPAGPSGLGSGTMAAGGGAPMADNNEGADGVGSSSGNWHCDSTWLGDGVITTSTRTWALPTYNNHLYKQISNGTSGGSTNDNTYFGYSTPWGYFDFNRFHCHFSPRDWQRLINNNWGFRPKSLNFKLFNIQVKEVTQNEGTKTIANNLTSTIQVFTDSEYQLPYVLGSAHQGCLPPFPADVFMIPQYGYLTLNNGSQAVGRSSFYCLEYFPSQMLRTGNNFEFSYQFEDVPFHSSYAHSQSLDRLMNPLIDQYLYYLSRTQSTGGTAGTQQLLFSQAGPNNMSAQAKNWLPGPCYRQQRVSTTLSQNDNSNFAWTGATKYHLNGRDSLVNPGVAMATHKDDEERFFPSSGVLMFGKQGAGKDNVDYSSVMLTSEEEIKTTNPVATEQYGVVADNLQQQNAAPIVGAVNSQGALPGMVWQNRDVYLQGPIWAKIPHTDGNFHPSPLMGGFGLKHPPPQILIKNTPVPADPPTTFSQAKLASFITQYSTGQVSVEIEWELQKENSKRWNPEIQYTSNYYKSTNVDFAVNTDGTYSEPRPIGTRYLTRNL

SEQ ID NO: 39 - DNA, 3121 bp, Artificial Sequence
  Description of Artificial Sequence: Synthetic polynucleotide
gaattcgcccttcgcgagaccaaagttcaactgaaacgaatcaaccggtttattgattaacaagcaattacagattacgggtgaggtaacgggtgccgatggggcgaggctcagaataagtgccatctgtgttaacagcaaagtccacatttgtagatttgtagtagttggaagtgtattgaatctctgggttccagcgtttgctgttttctttctgcagctcccattcaatttccacgctgacctgtccggtgctgtactgcgtgatgaacgacgccagcttagcttgactgaaggtagttggaggatccgcgggaacaggtgtattcttaatcaggatctgaggaggcgggtgtttcagtccaaagcctcccatcagcggcgagggatgaaagtttccgtccgtgtgaggaatcttggcccagataggaccctgcaggtacacgtcccggttctgccagaccatgccaggtaaggctccttgactgttgacggcccctacaataggagcggcgttttgctgttgcaggttatcggccaccacgccgtactgttctgtggccactgggttggtggttttaatttcttcctcactggttagcataacgctgctatagtccacgttgtcttttccagctccctgtttcccaaacattaagactccgctggacggaaaaaatcgctcttcgtcgtccttgtgggttgccatagcgacaccgggatttaccagagagtctctgccattcagatgatacttggtggcaccggtccaggcaaagttgctgttgtcattttgcgacagtgtcgtggagacgcgttgctgccggtagcagggcccgggtagccagtttttggcctgagccgacatgttattaggcccggcctgagaaaatagcaactgctgagttcctgcggtacctcccgtggactgagtccgagacaggtagtacaggtactggtcgatgagggggttcatcagccggtccaggctttggctgtgcgcgtagctgctgtgaaaaggcacgtcctcaaactggtagctgaactcaaagttgttgcccgttctcagcatttgagaaggaaagtactccaggcagtagaaggaggaacggcccacggcctgactgccattgttcagagtcaggtacccgtactgaggaatcatgaagacgtccgccgggaacggaggcaggcagccctggtgcgcagagccgaggacgtacgggagctggtattccgagtccgtaaagacctgaatcgtgctggtaaggttattggcgatggtcttggtgccttcattctgcgtgacctccttgacctggatgttgaagagcttgaagttgaggctcttgggccggaatccccagttgttgttgatgagtcgctgccagtcacgtggtgagaagtggcagtggaatctgttaaagtcaaaatacccccagggggtgctgtagccgaagtaggtgttgtcgttggtgcttcctcccgaagtcccgttggagatttgcttgtagaggtggttgttgtaggtggggagggcccaggttcgggtgctggtggtgatgactccgtcgcccagccatgtggaatcgcaatgccaatttcctgaggaactacccactccgtcggcgccttcgttattgtctgccattggagcgccaccgcctgcagccattgtaccagatcccagaccagaggggcctgcggggggttctccgattggttgagggtcgggcactgactctgagtcgccagtctgcccaaagttgagtctctttttcgcgggctgctggcctttcttgccgatgcccgtagaggagtctggagaacgctggggtgatggctctaccggtctcttctttccaggagccgtcttagcgccttcctcaaccagaccgagaggttcgagaacccgcttcttggcctggaagactgctcgcccgaggttgcccccaaaagacgtatcttcttgcagacgctcctgaaactcggcgtcggcgtggttataccgcaggtacggattgtcacccgctttgagctgctggtcgtaggccttgtcgtgctcgagggccgctgcgtccgccgcgttgacgggctcccccttgtcgagtccgttgaagggtccgaggtacttgtagccaggaagcaccagaccccggccgtcgtcctgcttttgctggttggctttgggcttcggggctccaggtttcagcgcccaccactcgcgaatgccctcagagaggttgtcctcgagccaatctggaagataaccatcggcagccatacctgatttaaatcatttattgttcaaagatgcagtcatccaaatccacattgaccagatcgcaggcagtgcaagcgtctggcacctttcccatgatatgatgaatgtagcacagtttctgatacgcctttttgacgacagaaacgggttgagattctgacacgggaaagcactctaaacagtctttctgtccgtgagtgaagcagatatttgaattctgattcattctctcgcattgtctgcagggaaacagcatcagattcatgcccacgtgacgagaacatttgttttggtacctgtctgcgtagttgatcgaagcttccgcgtctgacgtcgatggctgcgcaactgactcgcgcacccgtttgggctcacttatatctgcgtcactgggggcgggtcttttcttggctccaccctttttgacgtagaattcatgctccacctcaaccacgtgatcctttgcccaccggaaaaagtctttgacttcctgcttggtgaccttcccaaagtcatgatccagacggcgggtgagttcaaatttgaacatccggtcttgcaacggctgctggtgttcgaaggtcgttgagttcccgtcaatcacggcgcacatgttggtgttggaggtgacgatcacgggagtcgggtctatctgggccgaggacttgcatttctggtccacgcgcaccttgcttcctccgagaatggctttggccgactccacgaccttggcggtcatcttcccctcctcccaccagatcaccatcttgtcgacacagtcgttgaagggaaagttctcattggtccagttgacgcagccgtagaaagggcgaattc

SEQ ID NO: 40 - DNA, 2211 bp, Artificial Sequence
  Description of Artificial Sequence: Synthetic polynucleotide
atggctgctgacggttatcttccagattggctcgaggacaacctttctgaaggcattcgtgagtggtgggctctgaaacctggagtccctcaacccaaagcgaaccaacaacaccaggacaaccgtcggggtcttgtgcttccgggttacaaatacctcggacccggtaacggactcgacaaaggagagccggtcaacgaggcggacgcggcagccctcgaacacgacaaagcttacgaccagcagctcaaggccggtgacaacccgtacctcaagtacaaccacgccgacgccgagtttcaggagcgtcttcaagaagatacgtcttttgggggcaaccttggcagagcagtcttccaggccaaaaagaggatccttgagcctcttggtctggttgaggaagcagctaaaacggctcctggaaagaagggggctgtagatcagtctcctcaggaaccggactcatcatctggtgttggcaaatcgggcaaacagcctgccagaaaaagactaaatttcggtcagactggagactcagagtcagtcccagaccctcaacctctcggagaaccaccagcagcccccacaagtttgggatctaatacaatggcttcaggcggtggcgcaccaatggcagacaataacgagggtgccgatggagtgggtaattcctcaggaaattggcattgcgattcccaatggctgggcgacagagtcatcaccaccagcaccagaacctgggccctgcccacttacaacaaccatctctacaagcaaatctccagccaatcaggagcttcaaacgacaaccactactttggctacagcaccccttgggggtattttgactttaacagattccactgccacttctcaccacgtgactggcagcgactcattaacaacaactggggattccggcccaagaaactcagcttcaagctcttcaacatccaagttagaggggtcacgcagaacgatggcacgacgactattgccaataaccttaccagcacggttcaagtgtttacggactcggagtatcagctcccgtacgtgctcgggtcggcgcaccaaggctgtctcccgccgtttccagcggacgtcttcatggtccctcagtatggatacctcaccctgaacaacggaagtcaagcggtgggacgctcatccttttactgcctggagtacttcccttcgcagatgctaaggactggaaataacttccaattcagctataccttcgaggatgtaccttttcacagcagctacgctcacagccagagtttggatcgcttgatgaatcctcttattgatcagtatctgtactacctgaacagaacgcaaggaacaacctctggaacaaccaaccaatcacggctgctttttagccaggctgggcctcagtctatgtctttgcaggccagaaattggctacctgggccctgctaccggcaacagagactttcaaagactgctaacgacaacaacaacagtaactttccttggacagcggccagcaaatatcatctcaatggccgcgactcgctggtgaatccaggaccagctatggccagtcacaaggacgatgaagaaaaatttttccctatgcacggcaatctaatatttggcaaagaagggacaacggcaagtaacgcagaattagataatgtaatgattacggatgaagaagagattcgtaccaccaatcctgtggcaacagagcagtatggaactgtggcaaataacttgcagagctcaaatacagctcccacgactggaactgtcaatcatcagggggccttacctggcatggtgtggcaagatcgtgacgtgtaccttcaaggacctatctgggcaaagattcctcacacggatggacactttcatccttctcctctgatgggaggctttggactgaaacatccgcctcctcaaatcatgatcaaaaatactccggtaccggcaaatcctccgacgactttcagcccggccaagtttgcttcatttatcactcagtactccactggacaggtcagcgtggaaattgagtgggagctacagaaagaaaacagcaaacgttggaatccagagattcagtacacttccaactacaacaagtctgttaatgtggactttactgtagacactaatggtgtttatagtgaacctcgccctattggaacccggtatctcacacgaaacttgtga

SEQ ID NO: 41 - protein, 736 aa, Adeno-associated virus 3
MAADGYLPDWLEDNLSEGIREWWALKPGVPQPKANQQHQDNRRGLVLPGYKYLGPGNGLDKGEPVNEADAAALEHDKAYDQQLKAGDNPYLKYNHADAEFQERLQEDTSFGGNLGRAVFQAKKRILEPLGLVEEAAKTAPGKKGAVDQSPQEPDSSSGVGKSGKQPARKRLNFGQTGDSESVPDPQPLGEPPAAPTSLGSNTMASGGGAPMADNNEGADGVGNSSGNWHCDSQWLGDRVITTSTRTWALPTYNNHLYKQISSQSGASNDNHYFGYSTPWGYFDFNRFHCHFSPRDWQRLINNNWGFRPKKLSFKLFNIQVRGVTQNDGTTTIANNLTSTVQVFTDSEYQLPYVLGSAHQGCLPPFPADVFMVPQYGYLTLNNGSQAVGRSSFYCLEYFPSQMLRTGNNFQFSYTFEDVPFHSSYAHSQSLDRLMNPLIDQYLYYLNRTQGTTSGTTNQSRLLFSQAGPQSMSLQARNWLPGPCYRQQRLSKTANDNNNSNFPWTAASKYHLNGRDSLVNPGPAMASHKDDEEKFFPMHGNLIFGKEGTTASNAELDNVMITDEEEIRTTNPVATEQYGTVANNLQSSNTAPTTGTVNHQGALPGMVWQDRDVYLQGPIWAKIPHTDGHFHPSPLMGGFGLKHPPPQIMIKNTPVPANPPTTFSPAKFASFITQYSTGQVSVEIEWELQKENSKRWNPEIQYTSNYNKSVNVDFTVDTNGVYSEPRPIGTRYLTRNL

SEQ ID NO: 42 - DNA, 4726 bp, Adeno-associated virus serotype 3
ttggccactccctctatgcgcactcgctcgctcggtggggcctggcgaccaaaggtcgccagacggacgtgctttgcacgtccggccccaccgagcgagcgagtgcgcatagagggagtggccaactccatcactagaggtatggcagtgacgtaacgcgaagcgcgcgaagcgagaccacgcctaccagctgcgtcagcagtcaggtgacccttttgcgacagtttgcgacaccacgtggccgctgagggtatatattctcgagtgagcgaaccaggagctccattttgaccgcgaaatttgaacgagcagcagccatgccggggttctacgagattgtcctgaaggtcccgagtgacctggacgagcgcctgccgggcatttctaactcgtttgttaactgggtggccgagaaggaatgggacgtgccgccggattctgacatggatccgaatctgattgagcaggcacccctgaccgtggccgaaaagcttcagcgcgagttcctggtggagtggcgccgcgtgagtaaggccccggaggccctcttttttgtccagttcgaaaagggggagacctacttccacctgcacgtgctgattgagaccatcggggtcaaatccatggtggtcggccgctacgtgagccagattaaagagaagctggtgacccgcatctaccgcggggtcgagccgcagcttccgaactggttcgcggtgaccaaaacgcgaaatggcgccgggggcgggaacaaggtggtggacgactgctacatccccaactacctgctccccaagacccagcccgagctccagtgggcgtggactaacatggaccagtatttaagcgcctgtttgaatctcgcggagcgtaaacggctggtggcgcagcatctgacgcacgtgtcgcagacgcaggagcagaacaaagagaatcagaaccccaattctgacgcgccggtcatcaggtcaaaaacctcagccaggtacatggagctggtcgggtggctggtggaccgcgggatcacgtcagaaaagcaatggattcaggaggaccaggcctcgtacatctccttcaacgccgcctccaactcgcggtcccagatcaaggccgcgctggacaatgcctccaagatcatgagcctgacaaagacggctccggactacctggtgggcagcaacccgccggaggacattaccaaaaatcggatctaccaaatcctggagctgaacgggtacgatccgcagtacgcggcctccgtcttcctgggctgggcgcaaaagaagttcgggaagaggaacaccatctggctctttgggccggccacgacgggtaaaaccaacatcgcggaagccatcgcccacgccgtgcccttctacggctgcgtaaactggaccaatgagaactttcccttcaacgattgcgtcgacaagatggtgatctggtgggaggagggcaagatgacggccaaggtcgtggagagcgccaaggccattctgggcggaagcaaggtgcgcgtggaccaaaagtgcaagtcatcggcccagatcgaacccactcccgtgatcgtcacctccaacaccaacatgtgcgccgtgattgacgggaacagcaccaccttcgagcatcagcagccgctgcaggaccggatgtttgaatttgaacttacccgccgtttggaccatgactttgggaaggtcaccaaacaggaagtaaaggactttttccggtgggcttccgatcacgtgactgacgtggctcatgagttctacgtcagaaagggtggagctaagaaacgccccgcctccaatgacgcggatgtaagcgagccaaaacgggagtgcacgtcacttgcgcagccgacaacgtcagacgcggaagcaccggcggactacgcggacaggtaccaaaacaaatgttctcgtcacgtgggcatgaatctgatgctttttccctgtaaaacatgcgagagaatgaatcaaatttccaatgtctgttttacgcatggtcaaagagactgtggggaatgcttccctggaatgtcagaatctcaacccgtttctgtcgtcaaaaagaagacttatcagaaactgtgtccaattcatcatatcctgggaagggcacccgagattgcctgttcggcctgcgatttggccaatgtggacttggatgactgtgtttctgagcaataaatgacttaaaccaggtatggctgctgacggttatcttccagattggctcgaggacaacctttctgaaggcattcgtgagtggtgggctctgaaacctggagtccctcaacccaaagcgaaccaacaacaccaggacaaccgtcggggtcttgtgcttccgggttacaaatacctcggacccggtaacggactcgacaaaggagagccggtcaacgaggcggacgcggcagccctcgaacacgacaaagcttacgaccagcagctcaaggccggtgacaacccgtacctcaagtacaaccacgccgacgccgagtttcaggagcgtcttcaagaagatacgtcttttgggggcaaccttggcagagcagtcttccaggccaaaaagaggatccttgagcctcttggtctggttgaggaagcagctaaaacggctcctggaaagaagggggctgtagatcagtctcctcaggaaccggactcatcatctggtgttggcaaatcgggcaaacagcctgccagaaaaagactaaatttcggtcagactggagactcagagtcagtcccagaccctcaacctctcggagaaccaccagcagcccccacaagtttgggatctaatacaatggcttcaggcggtggcgcaccaatggcagacaataacgagggtgccgatggagtgggtaattcctcaggaaattggcattgcgattcccaatggctgggcgacagagtcatcaccaccagcaccagaacctgggccctgcccacttacaacaaccatctctacaagcaaatctccagccaatcaggagcttcaaacgacaaccactactttggctacagcaccccttgggggtattttgactttaacagattccactgccacttctcaccacgtgactggcagcgactcattaacaacaactggggattccggcccaagaaactcagcttcaagctcttcaacatccaagttagaggggtcacgcagaacgatggcacgacgactattgccaataaccttaccagcacggttcaagtgtttacggactcggagtatcagctcccgtacgtgctcgggtcggcgcaccaaggctgtctcccgccgtttccagcggacgtcttcatggtccctcagtatggatacctcaccctgaacaacggaagtcaagcggtgggacgctcatccttttactgcctggagtacttcccttcgcagatgctaaggactggaaataacttccaattcagctataccttcgaggatgtaccttttcacagcagctacgctcacagccagagtttggatcgcttgatgaatcctcttattgatcagtatctgtactacctgaacagaacgcaaggaacaacctctggaacaaccaaccaatcacggctgctttttagccaggctgggcctcagtctatgtctttgcaggccagaaattggctacctgggccctgctaccggcaacagagactttcaaagactgctaacgacaacaacaacagtaactttccttggacagcggccagcaaatatcatctcaatggccgcgactcgctggtgaatccaggaccagctatggccagtcacaaggacgatgaagaaaaatttttccctatgcacggcaatctaatatttggcaaagaagggacaacggcaagtaacgcagaattagataatgtaatgattacggatgaagaagagattcgtaccaccaatcctgtggcaacagagcagtatggaactgtggcaaataacttgcagagctcaaatacagctcccacgactggaactgtcaatcatcagggggccttacctggcatggtgtggcaagatcgtgacgtgtaccttcaaggacctatctgggcaaagattcctcacacggatggacactttcatccttctcctctgatgggaggctttggactgaaacatccgcctcctcaaatcatgatcaaaaatactccggtaccggcaaatcctccgacgactttcagcccggccaagtttgcttcatttatcactcagtactccactggacaggtcagcgtggaaattgagtgggagctacagaaagaaaacagcaaacgttggaatccagagattcagtacacttccaactacaacaagtctgttaatgtggactttactgtagacactaatggtgtttatagtgaacctcgccctattggaacccggtatctcacacgaaacttgtgaatcctggttaatcaataaaccgtttaattcgtttcagttgaactttggctcttgtgcacttctttatctttatcttgtttccatggctactgcgtagataagcagcggcctgcggcgcttgcgcttcgcggtttacaactgctggttaatatttaactctcgccatacctctagtgatggagttggccactccctctatgcgcactcgctcgctcggtggggcctggcgaccaaaggtcgccagacggacgtgctttgcacgtccggccccaccgagcgagcgagtgcgcatagagggagtggccaa

SEQ ID NO: 43 - protein, 737 aa, Artificial Sequence
  Description of Artificial Sequence: Synthetic polypeptide
MAADGYLPDWLEDNLSEGIREWWDLKPGAPKPKANQQKQDNGRGLVLPGYKYLGPFNGLDKGEPVNAADAAALEHDKAYDQQLNAGDNPYLRYNHADAEFQERLQEDTSFGGNLGRAVFQAKKRVLEPLGLVEEGAKTAPAKKRPVEPSPQRSPDSSTGIGKKGQQPARKRLNFGQTGDSESVPDPQPLGEPPAAPSSVGSGTVAAGGGAPMADNNEGADGVGNASGNWHCDSTWLGDRVITTSTRTWALPTYNNHLYEQISSETAGSTNDNTYFGYSTPWGYFDFNRFHCHFSPRDWQRLINNNWGFRPKKLRFKLFNIQVKEVTTNDGVTTIANNLTSTIQVFSDSEYQLPYVLGSAHQGCLPPFPADVFMIPQYGYLTLNNGSQSVGRSSFYCLEYFPSQMLRTGNNFEFSYSFEDVPFHSSYAHSQSLDRLMNPLIDQYLYYLARTQSDPGGTAGNRELQFYQGGPSTMAEQAKNWLPGPCFRQQRVSKTLDQNNNSNFAWTGATKYHLNGRNSLVNPGVAMATHKDDEDRFFPSSGVLIFGKTGATNKTTLENVLMTNEEEIRPTNPVATEEYGIVSSNLQAANTAAQTQVVNNQGALPGMVWQNRDVYLQGPIWAKIPHTDGNFHPSPLMGGFGLKHPPPQILIKNTPVPANPPEVFTPAKFASFITQYSTGQVSVEIEWELQKENSKRWDPEIQYTSNFEKQTGVDFAVDSQGVYSEPRPIGTRYLTRNL

SEQ ID NO: 44 - DNA, 2211 bp, Artificial Sequence
  Description of Artificial Sequence: Synthetic polynucleotide
atggctgctgacggttatcttccagattggctcgaggacaacctttctgaaggcattcgtgagtggtgggctctgaaacctggagtccctcaacccaaagcgaaccaacaacaccaggacaaccgtcggggtcttgtgcttccgggttacaaatacctcggacccggtaacggactcgacaaaggagagccggtcaacgaggcggacgcggcagccctcgaacacgacaaagcttacgaccagcagctcaaggccggtgacaacccgtacctcaagtacaaccacgccgacgccgagtttcaggagcgtcttcaagaagatacgtcttttgggggcaaccttggcagagcagtcttccaggccaaaaagaggatccttgagcctcttggtctggttgaggaagcagctaaaacggctcctggaaagaagggggctgtagatcagtctcctcaggaaccggactcatcatctggtgttggcaaatcgggcaaacagcctgccagaaaaagactaaatttcggtcagactggagactcagagtcagtcccagaccctcaacctctcggagaaccaccagcagcccccacaagtttgggatctaatacaatggcttcaggcggtggcgcaccaatggcagacaataacgagggtgccgatggagtgggtaattcctcaggaaattggcattgcgattcccaatggctgggcgacagagtcatcaccaccagcaccagaacctgggccctgcccacttacaacaaccatctctacaagcaaatctccagccaatcaggagcttcaaacgacaaccactactttggctacagcaccccttgggggtattttgactttaacagattccactgccacttctcaccacgtgactggcagcgactcattaacaacaactggggattccggcccaagaaactcagcttcaagctcttcaacatccaagttagaggggtcacgcagaacgatggcacgacgactattgccaataaccttaccagcacggttcaagtgtttacggactcggagtatcagctcccgtacgtgctcgggtcggcgcaccaaggctgtctcccgccgtttccagcggacgtcttcatggtccctcagtatggatacctcaccctgaacaacggaagtcaagcggtgggacgctcatccttttactgcctggagtacttcccttcgcagatgctaaggactggaaataacttccaattcagctataccttcgaggatgtaccttttcacagcagctacgctcacagccagagtttggatcgcttgatgaatcctcttattgatcagtatctgtactacctgaacagaacgcaaggaacaacctctggaacaaccaaccaatcacggctgctttttagccaggctgggcctcagtctatgtctttgcaggccagaaattggctacctgggccctgctaccggcaacagagactttcaaagactgctaacgacaacaacaacagtaactttccttggacagcggccagcaaatatcatctcaatggccgcgactcgctggtgaatccaggaccagctatggccagtcacaaggacgatgaagaaaaatttttccctatgcacggcaatctaatatttggcaaagaagggacaacggcaagtaacgcagaattagataatgtaatgattacggatgaagaagagattcgtaccaccaatcctgtggcaacagagcagtatggaactgtggcaaataacttgcagagctcaaatacagctcccacgactggaactgtcaatcatcagggggccttacctggcatggtgtggcaagatcgtgacgtgtaccttcaaggacctatctgggcaaagattcctcacacggatggacactttcatccttctcctctgatgggaggctttggactgaaacatccgcctcctcaaatcatgatcaaaaatactccggtaccggcaaatcctccgacgactttcagcccggccaagtttgcttcatttatcactcagtactccactggacaggtcagcgtggaaattgagtgggagctacagaaagaaaacagcaaacgttggaatccagagattcagtacacttccaactacaacaagtctgttaatgtggactttactgtagacactaatggtgtttatagtgaacctcgccctattggaacccggtatctcacacgaaacttgtaa

SEQ ID NO: 45 - protein, 736 aa, Artificial Sequence; identical to SEQ ID NO: 41
  Description of Artificial Sequence: Synthetic polypeptide

SEQ ID NO: 46 - protein, 736 aa, Adeno-associated virus 3A; identical to SEQ ID NO: 41

SEQ ID NO: 47 - protein, 624 aa, Adeno-associated virus 3A
MPGFYEIVLKVPSDLDERLPGISNSFVNWVAEKEWDVPPDSDMDPNLIEQAPLTVAEKLQREFLVEWRRVSKAPEALFFVQFEKGETYFHLHVLIETIGVKSMVVGRYVSQIKEKLVTRIYRGVEPQLPNWFAVTKTRNGAGGGNKVVDDCYIPNYLLPKTQPELQWAWTNMDQYLSACLNLAERKRLVAQHLTHVSQTQEQNKENQNPNSDAPVIRSKTSARYMELVGWLVDRGITSEKQWIQEDQASYISFNAASNSRSQIKAALDNASKIMSLTKTAPDYLVGSNPPEDITKNRIYQILELNGYDPQYAASVFLGWAQKKFGKRNTIWLFGPATTGKTNIAEAIAHAVPFYGCVNWTNENFPFNDCVDKMVIWWEEGKMTAKVVESAKAILGGSKVRVDQKCKSSAQIEPTPVIVTSNTNMCAVIDGNSTTFEHQQPLQDRMFEFELTRRLDHDFGKVTKQEVKDFFRWASDHVTDVAHEFYVRKGGAKKRPASNDADVSEPKRECTSLAQPTTSDAEAPADYADRYQNKCSRHVGMNLMLFPCKTCERMNQISNVCFTHGQRDCGECFPGMSESQPVSVVKKKTYQKLCPIHHILGRAPEIACSACDLANVDLDDCVSEQ

SEQ ID NO: 48 - protein, 736 aa, Adeno-associated virus 3B
MAADGYLPDWLEDNLSEGIREWWALKPGVPQPKANQQHQDNRRGLVLPGYKYLGPGNGLDKGEPVNEADAAALEHDKAYDQQLKAGDNPYLKYNHADAEFQERLQEDTSFGGNLGRAVFQAKKRILEPLGLVEEAAKTAPGKKRPVDQSPQEPDSSSGVGKSGKQPARKRLNFGQTGDSESVPDPQPLGEPPAAPTSLGSNTMASGGGAPMADNNEGADGVGNSSGNWHCDSQWLGDRVITTSTRTWALPTYNNHLYKQISSQSGASNDNHYFGYSTPWGYFDFNRFHCHFSPRDWQRLINNNWGFRPKKLSFKLFNIQVKEVTQNDGTTTIANNLTSTVQVFTDSEYQLPYVLGSAHQGCLPPFPADVFMVPQYGYLTLNNGSQAVGRSSFYCLEYFPSQMLRTGNNFQFSYTFEDVPFHSSYAHSQSLDRLMNPLIDQYLYYLNRTQGTTSGTTNQSRLLFSQAGPQSMSLQARNWLPGPCYRQQRLSKTANDNNNSNFPWTAASKYHLNGRDSLVNPGPAMASHKDDEEKFFPMHGNLIFGKEGTTASNAELDNVMITDEEEIRTTNPVATEQYGTVANNLQSSNTAPTTRTVNDQGALPGMVWQDRDVYLQGPIWAKIPHTDGHFHPSPLMGGFGLKHPPPQIMIKNTPVPANPPTTFSPAKFASFITQYSTGQVSVEIEWELQKENSKRWNPEIQYTSNYNKSVNVDFTVDTNGVYSEPRPIGTRYLTRNL

SEQ ID NO: 49 - protein, 624 aa, Adeno-associated virus 3B
MPGFYEIVLKVPSDLDEHLPGISNSFVNWVAEKEWELPPDSDMDPNLIEQAPLTVAEKLQREFLVEWRRVSKAPEALFFVQFEKGETYFHLHVLIETIGVKSMVVGRYVSQIKEKLVTRIYRGVEPQLPNWFAVTKTRNGAGGGNKVVDDCYIPNYLLPKTQPELQWAWTNMDQYLSACLNLAERKRLVAQHLTHVSQTQEQNKENQNPNSDAPVIRSKTSARYMELVGWLVDRGITSEKQWIQEDQASYISFNAASNSRSQIKAALDNASKIMSLTKTAPDYLVGSNPPEDITKNRIYQILELNGYDPQYAASVFLGWAQKKFGKRNTIWLFGPATTGKTNIAEAIAHAVPFYGCVNWTNENFPFNDCVDKMVIWWEEGKMTAKVVESAKAILGGSKVRVDQKCKSSAQIEPTPVIVTSNTNMCAVIDGNSTTFEHQQPLQDRMFKFELTRRLDHDFGKVTKQEVKDFFRWASDHVTDVAHEFYVRKGGAKKRPASNDADVSEPKRQCTSLAQPTTSDAEAPADYADRYQNKCSRHVGMNLMLFPCKTCERMNQISNVCFTHGQRDCGECFPGMSESQPVSVVKKKTYQKLCPIHHILGRAPEIACSACDLANVDLDDCVSEQ

SEQ ID NO: 50 - DNA, 4722 bp, Adeno-associated virus 3B
tggccactccctctatgcgcactcgctcgctcggtggggcctggcgaccaaaggtcgccagacggacgtgctttgcacgtccggccccaccgagcgagcgagtgcgcatagagggagtggccaactccatcactagaggtatggcagtgacgtaacgcgaagcgcgcgaagcgagaccacgcctaccagctgcgtcagcagtcaggtgacccttttgcgacagtttgcgacaccacgtggccgctgagggtatatattctcgagtgagcgaaccaggagctccattttgaccgcgaaatttgaacgagcagcagccatgccggggttctacgagattgtcctgaaggtcccgagtgacctggacgagcacctgccgggcatttctaactcgtttgttaactgggtggccgagaaggaatgggagctgccgccggattctgacatggatccgaatctgattgagcaggcacccctgaccgtggccgaaaagcttcagcgcgagttcctggtggagtggcgccgcgtgagtaaggccccggaggccctcttttttgtccagttcgaaaagggggagacctacttccacctgcacgtgctgattgagaccatcggggtcaaatccatggtggtcggccgctacgtgagccagattaaagagaagctggtgacccgcatctaccgcggggtcgagccgcagcttccgaactggttcgcggtgaccaaaacgcgaaatggcgccgggggcgggaacaaggtggtggacgactgctacatccccaactacctgctccccaagacccagcccgagctccagtgggcgtggactaacatggaccagtatttaagcgcctgtttgaatctcgcggagcgtaaacggctggtggcgcagcatctgacgcacgtgtcgcagacgcaggagcagaacaaagagaatcagaaccccaattctgacgcgccggtcatcaggtcaaaaacctcagccaggtacatggagctggtcgggtggctggtggaccgcgggatcacgtcagaaaagcaatggattcaggaggaccaggcctcgtacatctccttcaacgccgcctccaactcgcggtcccagatcaaggccgcgctggacaatgcctccaagatcatgagcctgacaaagacggctccggactacctggtgggcagcaacccgccggaggacattaccaaaaatcggatctaccaaatcctggagctgaacgggtacgatccgcagtacgcggcctccgtcttcctgggctgggcgcaaaagaagttcgggaagaggaacaccatctggctctttgggccggccacgacgggtaaaaccaacatcgcggaagccatcgcccacgccgtgcccttctacggctgcgtaaactggaccaatgagaactttcccttcaacgattgcgtcgacaagatggtgatctggtgggaggagggcaagatgacggccaaggtcgtggagagcgccaaggccattctgggcggaagcaaggtgcgcgtggaccaaaagtgcaagtcatcggcccagatcgaacccactcccgtgatcgtcacctccaacaccaacatgtgcgccgtgattgacgggaacagcaccaccttcgagcatcagcagccgctgcaggaccggatgtttaaatttgaacttacccgccgtttggaccatgactttgggaaggtcaccaaacaggaagtaaaggactttttccggtgggcttccgatcacgtgactgacgtggctcatgagttctacgtcagaaagggtggagctaagaaacgccccgcctccaatgacgcggatgtaagcgagccaaaacggcagtgcacgtcacttgcgcagccgacaacgtcagacgcggaagcaccggcggactacgcggacaggtaccaaaacaaatgttctcgtcacgtgggcatgaatctgatgctttttccctgtaaaacatgcgagagaatgaatcaaatttccaatgtctgttttacgcatggtcaaagagactgtggggaatgcttccctggaatgtcagaatctcaacccgtttctgtcgtcaaaaagaagacttatcagaaactgtgtccaattcatcatatcctgggaagggcacccgagattgcctgttcggcctgcgatttggccaatgtggacttggatgactgtgtttctgagcaataaatgacttaaaccaggtatggctgctgacggttatcttccagattggctcgaggacaacctttctgaaggcattcgtgagtggtgggctctgaaacctggagtccctcaacccaaagcgaaccaacaacaccaggacaaccgtcggggtcttgtgcttccgggttacaaatacctcggacccggtaacggactcgacaaaggagagccggtcaacgaggcggacgcggcagccctcgaacacgacaaagcttacgaccagcagctcaaggccggtgacaacccgtacctcaagtacaaccacgccgacgccgagtttcaggagcgtcttcaagaagatacgtcttttgggggcaaccttggcagagcagtcttccaggccaaaaagaggatccttgagcctcttggtctggttgaggaagcagctaaaacggctcctggaaagaagaggcctgtagatcagtctcctcaggaaccggactcatcatctggtgttggcaaatcgggcaaacagcctgccagaaaaagactaaatttcggtcagactggcgactcagagtcagtcccagaccctcaacctctcggagaaccaccagcagcccccacaagtttgggatctaatacaatggcttcaggcggtggcgcaccaatggcagacaataacgagggtgccgatggagtgggtaattcctcaggaaattggcattgcgattcccaatggctgggcgacagagtcatcaccaccagcaccagaacctgggccctgcccacttacaacaaccatctctacaagcaaatctccagccaatcaggagcttcaaacgacaaccactactttggctacagcaccccttgggggtattttgactttaacagattccactgccacttctcaccacgtgactggcagcgactcattaacaacaactggggattccggcccaagaaactcagcttcaagctcttcaacatccaagttaaagaggtcacgcagaacgatggcacgacgactattgccaataaccttaccagcacggttcaagtgtttacggactcggagtatcagctcccgtacgtgctcgggtcggcgcaccaaggctgtctcccgccgtttccagcggacgtcttcatggtccctcagtatggatacctcaccctgaacaacggaagtcaagcggtgggacgctcatccttttactgcctggagtacttcccttcgcagatgctaaggactggaaataacttccaattcagctataccttcgaggatgtaccttttcacagcagctacgctcacagccagagtttggatcgcttgatgaatcctcttattgatcagtatctgtactacctgaacagaacgcaaggaacaacctctggaacaaccaaccaatcacggctgctttttagccaggctgggcctcagtctatgtctttgcaggccagaaattggctacctgggccctgctaccggcaacagagactttcaaagactgctaacgacaacaacaacagtaactttccttggacagcggccagcaaatatcatctcaatggccgcgactcgctggtgaatccaggaccagctatggccagtcacaaggacgatgaagaaaaatttttccctatgcacggcaatctaatatttggcaaagaagggacaacggcaagtaacgcagaattagataatgtaatgattacggatgaagaagagattcgtaccaccaatcctgtggcaacagagcagtatggaactgtggcaaataacttgcagagctcaaatacagctcccacgactagaactgtcaatgatcagggggccttacctggcatggtgtggcaagatcgtgacgtgtaccttcaaggacctatctgggcaaagattcctcacacggatggacactttcatccttctcctctgatgggaggctttggactgaaacatccgcctcctcaaatcatgatcaaaaatactccggtaccggcaaatcctccgacgactttcagcccggccaagtttgcttcatttatcactcagtactccactggacaggtcagcgtggaaattgagtgggagctacagaaagaaaacagcaaacgttggaatccagagattcagtacacttccaactacaacaagtctgttaatgtggactttactgtagacactaatggtgtttatagtgaacctcgccctattggaacccggtatctcacacgaaacttgtaatcctggttaatcaataaaccgtttaattcgtttcagttgaactttggctcttgtgcacttcttatcttatcttgtttccatggctactgcgtagataagcagcggcctgcggcgcttgcgcttcgcggtttacaactgctggttaatatttaactctcgccatacctctagtgatggagttggccactccctctatgcgcactcgctcgctcggtggggccggacgtgcaaagcacgtccgtctggcgacctttggtcgccaggccccaccgagcgagcgagtgcgcatagagggagtggccaa

SEQ ID NO: 51 - DNA, 1800 bp, Adeno-associated virus 4
  modified_base (342)..(342): Unknown
acggctcctggaaagaagagaccgttgattgaatccccccagcagcccgactcctccacgggtatcggcaaaaaaggcaagcagccggctaaaaagaagctcgttttcgaagacgaaactggagcaggcgacggaccccctgagggatcaacttccggagccatgtctgatgacagtgagatgcgtgcagcagctggcggagctgcagtcgagggsggacaaggtgccgatggagtgggtaatgcctcgggtgattggcattgcgattccacctggtctgagggccacgtcacgaccaccagcaccagaacctgggtcttgcccacctacaacaaccacctntacaagcgactcggagagagcctgcagtccaacacctacaacggattctccaccccctggggatactttgacttcaaccgcttccactgccacttctcaccacgtgactggcagcgactcatcaacaacaactggggcatgcgacccaaagccatgcgggtcaaaatcttcaacatccaggtcaaggaggtcacgacgtcgaacggcgagacaacggtggctaataaccttaccagcacggttcagatctttgcggactcgtcgtacgaactgccgtacgtgatggatgcgggtcaagagggcagcctgcctccttttcccaacgacgtctttatggtgccccagtacggctactgtggactggtgaccggcaacacttcgcagcaacagactgacagaaatgccttctactgcctggagtactttccttcgcagatgctgcggactggcaacaactttgaaattacgtacagttttgagaaggtgcctttccactcgatgtacgcgcacagccagagcctggaccggctgatgaaccctctcatcgaccagtacctgtggggactgcaatcgaccaccaccggaaccaccctgaatgccgggactgccaccaccaactttaccaagctgcggcctaccaacttttccaactttaaaaagaactggctgcccgggccttcaatcaagcagcagggcttctcaaagactgccaatcaaaactacaagatccctgccaccgggtcagacagtctcatcaaatacgagacgcacagcactctggacggaagatggagtgccctgacccccggacctccaatggccacggctggacctgcggacagcaagttcagcaacagccagctcatctttgcggggcctaaacagaacggcaacacggccaccgtacccgggactctgatcttcacctctgaggaggagctggcagccaccaacgccaccgatacggacatgtggggcaacctacctggcggtgaccagagcaacagcaacctgccgaccgtggacagactgacagccttgggagccgtgcctggaatggtctggcaaaacagagacatttactaccagggtcccatttgggccaagattcctcataccgatggacactttcacccctcaccgctgattggtgggtttgggctgaaacacccgcctcctcaaatttttatcaagaacaccccggtacctgcgaatcctgcaacgaccttcagctctactccggtaaactccttcattactcagtacagcactggccaggtgtcggtgcagattgactgggagatccagaaggagcggtccaaacgctggaaccccgaggtccagtttacctccaactacggacagcaaaactctctgttgtgggctcccgatgcggctgggaaatacactgagcctagggctatcggtacccgctacctcacccaccacctgtaataa

SEQ ID NO: 52 - DNA, 2208 bp, Adeno-associated virus 4
  modified_base (750)..(750): Unknown
atgactgacggttaccttccagattggctagaggacaacctctctgaaggcgttcgagagtggtgggcgctgcaacctggagcccctaaacccaaggcaaatcaacaacatcaggacaacgctcggggtcttgtgcttccgggttacaaatacctcggacccggcaacggactcgacaagggggaacccgtcaacgcagcggacgcggcagccctcgagcacgacaaggcctacgaccagcagctcaaggccggtgacaacccctacctcaagtacaaccacgccgacgcggagttccagcagcggcttcagggcgacacatcgtttgggggcaacctcggcagagcagtcttccaggccaaaaagagggttcttgaacctcttggtctggttgagcaagcgggtgagacggctcctggaaagaagagaccgttgattgaatccccccagcagcccgactcctccacgggtatcggcaaaaaaggcaagcagccggctaaaaagaagctcgttttcgaagacgaaactggagcaggcgacggaccccctgagggatcaacttccggagccatgtctgatgacagtgagatgcgtgcagcagctggcggagctgcagtcgagggsggacaaggtgccgatggagtgggtaatgcctcgggtgattggcattgcgattccacctggtctgagggccacgtcacgaccaccagcaccagaacctgggtcttgcccacctacaacaaccacctntacaagcgactcggagagagcctgcagtccaacacctacaacggattctccaccccctggggatactttgacttcaaccgcttccactgccacttctcaccacgtgactggcagcgactcatcaacaacaactggggcatgcgacccaaagccatgcgggtcaaaatcttcaacatccaggtcaaggaggtcacgacgtcgaacggcgagacaacggtggctaataaccttaccagcacggttcagatctttgcggactcgtcgtacgaactgccgtacgtgatggatgcgggtcaagagggcagcctgcctccttttcccaacgacgtctttatggtgccccagtacggctactgtggactggtgaccggcaacacttcgcagcaacagactgacagaaatgccttctactgcctggagtactttccttcgcagatgctgcggactggcaacaactttgaaattacgtacagttttgagaaggtgcctttccactcgatgtacgcgcacagccagagcctggaccggctgatgaaccctctcatcgaccagtacctgtggggactgcaatcgaccaccaccggaaccaccctgaatgccgggactgccaccaccaactttaccaagctgcggcctaccaacttttccaactttaaaaagaactggctgcccgggccttcaatcaagcagcagggcttctcaaagactgccaatcaaaactacaagatccctgccaccgggtcagacagtctcatcaaatacgagacgcacagcactctggacggaagatggagtgccctgacccccggacctccaatggccacggctggacctgcggacagcaagttcagcaacagccagctcatctttgcggggcctaaacagaacggcaacacggccaccgtacccgggactctgatcttcacctctgaggaggagctggcagccaccaacgccaccgatacggacatgtggggcaacctacctggcggtgaccagagcaacagcaacctgccgaccgtggacagactgacagccttgggagccgtgcctggaatggtctggcaaaacagagacatttactaccagggtcccatttgggccaagattcctcataccgatggacactttcacccctcaccgctgattggtgggtttgggctgaaacacccgcctcctcaaatttttatcaagaacaccccggtacctgcgaatcctgcaacgaccttcagctctactccggtaaactccttcattactcagtacagcactggccaggtgtcggtgcagattgactgggagatccagaaggagcggtccaaacgctggaaccccgaggtccagtttacctccaactacggacagcaaaactctctgttgtgggctcccgatgcggctgggaaatacactgagcctagggctatcggtacccgctacctcacccaccacctgtaataa

SEQ ID NO: 53 - DNA, 1872 bp, Adeno-associated virus 4
atgccggggttctacgagatcgtgctgaaggtgcccagcgacctggacgagcacctgcccggcatttctgactcttttgtgagctgggtggccgagaaggaatgggagctgccgccggattctgacatggacttgaatctgattgagcaggcacccctgaccgtggccgaaaagctgcaacgcgagttcctggtcgagtggcgccgcgtgagtaaggccccggaggccctcttctttgtccagttcgagaagggggacagctacttccacctgcacatcctggtggagaccgtgggcgtcaaatccatggtggtgggccgctacgtgagccagattaaagagaagctggtgacccgcatctaccgcggggtcgagccgcagcttccgaactggttcgcggtgaccaagacgcgtaatggcgccggaggcgggaacaaggtggtggacgactgctacatccccaactacctgctccccaagacccagcccgagctccagtgggcgtggactaacatggaccagtatataagcgcctgtttgaatctcgcggagcgtaaacggctggtggcgcagcatctgacgcacgtgtcgcagacgcaggagcagaacaaggaaaaccagaaccccaattctgacgcgccggtcatcaggtcaaaaacctccgccaggtacatggagctggtcgggtggctggtggaccgcgggatcacgtcagaaaagcaatggatccaggaggaccaggcgtcctacatctccttcaacgccgcctccaactcgcggtcacaaatcaaggccgcgctggacaatgcctccaaaatcatgagcctgacaaagacggctccggactacctggtgggccagaacccgccggaggacatttccagcaaccgcatctaccgaatcctcgagatgaacgggtacgatccgcagtacgcggcctccgtcttcctgggctgggcgcaaaagaagttcgggaagaggaacaccatctggctctttgggccggccacgacgggtaaaaccaacatcgcggaagccatcgcccacgccgtgcccttctacggctgcgtgaactggaccaatgagaactttccgttcaacgattgcgtcgacaagatggtgatctggtgggaggagggcaagatgacggccaaggtcgtagagagcgccaaggccatcctgggcggaagcaaggtgcgcgtggaccaaaagtgcaagtcatcggcccagatcgacccaactcccgtgatcgtcacctccaacaccaacatgtgcgcggtcatcgacggaaactcgaccaccttcgagcaccaacaaccactccaggaccggatgttcaagttcgagctcaccaagcgcctggagcacgactttggcaaggtcaccaagcaggaagtcaaagactttttccggtgggcgtcagatcacgtgaccgaggtgactcacgagttttacgtcagaaagggtggagctagaaagaggcccgcccccaatgacgcagatataagtgagcccaagcgggcctgtccgtcagttgcgcagccatcgacgtcagacgcggaagctccggtggactacgcggacaggtaccaaaacaaatgttctcgtcacgtgggtatgaatctgatgctttttccctgccggcaatgcgagagaatgaatcagaatgtggacatttgcttcacgcacggggtcatggactgtgccgagtgcttccccgtgtcagaatctcaacccgtgtctgtcgtcagaaagcggacgtatcagaaactgtgtccgattcatcacatcatggggagggcgcccgaggtggcctgctcggcctgcgaactggccaatgtggacttggatgactgtgacatggaacaataa

SEQ ID NO: 54 - DNA, 1611 bp, Adeno-associated virus 4
atgccggggttctacgagatcgtgctgaaggtgcccagcgacctggacgagcacctgcccggcatttctgactcttttgtgagctgggtggccgagaaggaatgggagctgccgccggattctgacatggacttgaatctgattgagcaggcacccctgaccgtggccgaaaagctgcaacgcgagttcctggtcgagtggcgccgcgtgagtaaggccccggaggccctcttctttgtccagttcgagaagggggacagctacttccacctgcacatcctggtggagaccgtgggcgtcaaatccatggtggtgggccgctacgtgagccagattaaagagaagctggtgacccgcatctaccgcggggtcgagccgcagcttccgaactggttcgcggtgaccaagacgcgtaatggcgccggaggcgggaacaaggtggtggacgactgctacatccccaactacctgctccccaagacccagcccgagctccagtgggcgtggactaacatggaccagtatataagcgcctgtttgaatctcgcggagcgtaaacggctggtggcgcagcatctgacgcacgtgtcgcagacgcaggagcagaacaaggaaaaccagaaccccaattctgacgcgccggtcatcaggtcaaaaacctccgccaggtacatggagctggtcgggtggctggtggaccgcgggatcacgtcagaaaagcaatggatccaggaggaccaggcgtcctacatctccttcaacgccgcctccaactcgcggtcacaaatcaaggccgcgctggacaatgcctccaaaatcatgagcctgacaaagacggctccggactacctggtgggccagaacccgccggaggacatttccagcaaccgcatctaccgaatcctcgagatgaacgggtacgatccgcagtacgcggcctccgtcttcctgggctgggcgcaaaagaagttcgggaagaggaacaccatctggctctttgggccggccacgacgggtaaaaccaacatcgcggaagccatcgcccacgccgtgcccttctacggctgcgtgaactggaccaatgagaactttccgttcaacgattgcgtcgacaagatggtgatctggtgggaggagggcaagatgacggccaaggtcgtagagagcgccaaggccatcctgggcggaagcaaggtgcgcgtggaccaaaagtgcaagtcatcggcccagatcgacccaactcccgtgatcgtcacctccaacaccaacatgtgcgcggtcatcgacggaaactcgaccaccttcgagcaccaacaaccactccaggaccggatgttcaagttcgagctcaccaagcgcctggagcacgactttggcaaggtcaccaagcaggaagtcaaagactttttccggtgggcgtcagatcacgtgaccgaggtgactcacgagttttacgtcagaaagggtggagctagaaagaggcccgcccccaatgacgcagatataagtgagcccaagcgggcctgtccgtcagttgcgcagccatcgacgtcagacgcggaagctccggtggactacgcggacagattggctagaggacaacctctctga

SEQ ID NO: 55 - DNA, 1872 bp, Adeno-associated virus 4; identical to SEQ ID NO: 53

SEQ ID NO: 56 - DNA, 1617 bp, Adeno-associated virus 4
  modified_base (162)..(162): Unknown
atgcgtgcagcagctggcggagctgcagtcgagggsggacaaggtgccgatggagtgggtaatgcctcgggtgattggcattgcgattccacctggtctgagggccacgtcacgaccaccagcaccagaacctgggtcttgcccacctacaacaaccacctntacaagcgactcggagagagcctgcagtccaacacctacaacggattctccaccccctggggatactttgacttcaaccgcttccactgccacttctcaccacgtgactggcagcgactcatcaacaacaactggggcatgcgacccaaagccatgcgggtcaaaatcttcaacatccaggtcaaggaggtcacgacgtcgaacggcgagacaacggtggctaataaccttaccagcacggttcagatctttgcggactcgtcgtacgaactgccgtacgtgatggatgcgggtcaagagggcagcctgcctccttttcccaacgacgtctttatggtgccccagtacggctactgtggactggtgaccggcaacacttcgcagcaacagactgacagaaatgccttctactgcctggagtactttccttcgcagatgctgcggactggcaacaactttgaaattacgtacagttttgagaaggtgcctttccactcgatgtacgcgcacagccagagcctggaccggctgatgaaccctctcatcgaccagtacctgtggggactgcaatcgaccaccaccggaaccaccctgaatgccgggactgccaccaccaactttaccaagctgcggcctaccaacttttccaactttaaaaagaactggctgcccgggccttcaatcaagcagcagggcttctcaaagactgccaatcaaaactacaagatccctgccaccgggtcagacagtctcatcaaatacgagacgcacagcactctggacggaagatggagtgccctgacccccggacctccaatggccacggctggacctgcggacagcaagttcagcaacagccagctcatctttgcggggcctaaacagaacggcaacacggccaccgtacccgggactctgatcttcacctctgaggaggagctggcagccaccaacgccaccgatacggacatgtggggcaacctacctggcggtgaccagagcaacagcaacctgccgaccgtggacagactgacagccttgggagccgtgcctggaatggtctggcaaaacagagacatttactaccagggtcccatttgggccaagattcctcataccgatggacactttcacccctcaccgctgattggtgggtttgggctgaaacacccgcctcctcaaatttttatcaagaacaccccggtacctgcgaatcctgcaacgaccttcagctctactccggtaaactccttcattactcagtacagcactggccaggtgtcggtgcagattgactgggagatccagaaggagcggtccaaacgctggaaccccgaggtccagtttacctccaactacggacagcaaaactctctgttgtgggctcccgatgcggctgggaaatacactgagcctagggctatcggtacccgctacctcacccaccacctgtaa

SEQ ID NO: 57 - DNA, 939 bp, Adeno-associated virus 4
atggagctggtcgggtggctggtggaccgcgggatcacgtcagaaaagcaatggatccaggaggaccaggcgtcctacatctccttcaacgccgcctccaactcgcggtcacaaatcaaggccgcgctggacaatgcctccaaaatcatgagcctgacaaagacggctccggactacctggtgggccagaacccgccggaggacatttccagcaaccgcatctaccgaatcctcgagatgaacgggtacgatccgcagtacgcggcctccgtcttcctgggctgggcgcaaaagaagttcgggaagaggaacaccatctggctctttgggccggccacgacgggtaaaaccaacatcgcggaagccatcgcccacgccgtgcccttctacggctgcgtgaactggaccaatgagaactttccgttcaacgattgcgtcgacaagatggtgatctggtgggaggagggcaagatgacggccaaggtcgtagagagcgccaaggccatcctgggcggaagcaaggtgcgcgtggaccaaaagtgcaagtcatcggcccagatcgacccaactcccgtgatcgtcacctccaacaccaacatgtgcgcggtcatcgacggaaactcgaccaccttcgagcaccaacaaccactccaggaccggatgttcaagttcgagctcaccaagcgcctggagcacgactttggcaaggtcaccaagcaggaagtcaaagactttttccggtgggcgtcagatcacgtgaccgaggtgactcacgagttttacgtcagaaagggtggagctagaaagaggcccgcccccaatgacgcagatataagtgagcccaagcgggcctgtccgtcagttgcgcagccatcgacgtcagacgcggaagctccggtggactacgcggacagattggctagaggacaacctctctga

SEQ ID NO: 58 - DNA, 1197 bp, Adeno-associated virus 4
atggagctggtcgggtggctggtggaccgcgggatcacgtcagaaaagcaatggatccaggaggaccaggcgtcctacatctccttcaacgccgcctccaactcgcggtcacaaatcaaggccgcgctggacaatgcctccaaaatcatgagcctgacaaagacggctccggactacctggtgggccagaacccgccggaggacatttccagcaaccgcatctaccgaatcctcgagatgaacgggtacgatccgcagtacgcggcctccgtcttcctgggctgggcgcaaaagaagttcgggaagaggaacaccatctggctctttgggccggccacgacgggtaaaaccaacatcgcggaagccatcgcccacgccgtgcccttctacggctgcgtgaactggaccaatgagaactttccgttcaacgattgcgtcgacaagatggtgatctggtgggaggagggcaagatgacggccaaggtcgtagagagcgccaaggccatcctgggcggaagcaaggtgcgcgtggaccaaaagtgcaagtcatcggcccagatcgacccaactcccgtgatcgtcacctccaacaccaacatgtgcgcggtcatcgacggaaactcgaccaccttcgagcaccaacaaccactccaggaccggatgttcaagttcgagctcaccaagcgcctggagcacgactttggcaaggtcaccaagcaggaagtcaaagactttttccggtgggcgtcagatcacgtgaccgaggtgactcacgagttttacgtcagaaagggtggagctagaaagaggcccgcccccaatgacgcagatataagtgagcccaagcgggcctgtccgtcagttgcgcagccatcgacgtcagacgcggaagctccggtggactacgcggacaggtaccaaaacaaatgttctcgtcacgtgggtatgaatctgatgctttttccctgccggcaatgcgagagaatgaatcagaatgtggacatttgcttcacgcacggggtcatggactgtgccgagtgcttccccgtgtcagaatctcaacccgtgtctgtcgtcagaaagcggacgtatcagaaactgtgtccgattcatcacatcatggggagggcgcccgaggtggcctgctcggcctgcgaactggccaatgtggacttggatgactgtgacatggaacaa

SEQ ID NO: 59 - DNA, 245 bp, Adeno-associated virus 4
ctccatcatctaggtttgcccactgacgtcaatgtgacgtcctagggttagggaggtccctgtattagcagtcacgtgagtgtcgtatttcgcggagcgtagcggagcgcataccaagctgccacgtcacagccacgtggtccgtttgcgacagtttgcgacaccatgtggtcaggagggtatataaccgcgagtgagccagcgaggagctccattttgcccgcgaattttgaacgagcagcagc

SEQ ID NO: 60 - protein, 313 aa, Adeno-associated virus 4
  MOD_RES (313)..(313): Unknown
MELVGWLVDRGITSEKQWIQEDQASYISFNAASNSRSQIKAALDNASKIMSLTKTAPDYLVGQNPPEDISSNRIYRILEMNGYDPQYAASVFLGWAQKKFGKRNTIWLFGPATTGKTNIAEAIAHAVPFYGCVNWTNENFPFNDCVDKMVIWWEEGKMTAKVVESAKAILGGSKVRVDQKCKSSAQIDPTPVIVTSNTNMCAVIDGNSTTFEHQQPLQDRMFKFELTKRLEHDFGKVTKQEVKDFFRWASDHVTEVTHEFYVRKGGARKRPAPNDADISEPKRACPSVAQPSTSDAEAPVDYADRLARGQPLX

SEQ ID NO: 61 - protein, 399 aa, Adeno-associated virus 4
MELVGWLVDRGITSEKQWIQEDQASYISFNAASNSRSQIKAALDNASKIMSLTKTAPDYLVGQNPPEDISSNRIYRILEMNGYDPQYAASVFLGWAQKKFGKRNTIWLFGPATTGKTNIAEAIAHAVPFYGCVNWTNENFPFNDCVDKMVIWWEEGKMTAKVVESAKAILGGSKVRVDQKCKSSAQIDPTPVIVTSNTNMCAVIDGNSTTFEHQQPLQDRMFKFELTKRLEHDFGKVTKQEVKDFFRWASDHVTEVTHEFYVRKGGARKRPAPNDADISEPKRACPSVAQPSTSDAEAPVDYADRYQNKCSRHVGMNLMLFPCRQCERMNQNVDICFTHGVMDCAECFPVSESQPVSVVRKRTYQKLCPIHHIMGRAPEVACSACELANVDLDDCDMEQ

SEQ ID NO: 62 - protein, 623 aa, Adeno-associated virus 4
MPGFYEIVLKVPSDLDEHLPGISDSFVSWVAEKEWELPPDSDMDLNLIEQAPLTVAEKLQREFLVEWRRVSKAPEALFFVQFEKGDSYFHLHILVETVGVKSMVVGRYVSQIKEKLVTRIYRGVEPQLPNWFAVTKTRNGAGGGNKVVDDCYIPNYLLPKTQPELQWAWTNMDQYISACLNLAERKRLVAQHLTHVSQTQEQNKENQNPNSDAPVIRSKTSARYMELVGWLVDRGITSEKQWIQEDQASYISFNAASNSRSQIKAALDNASKIMSLTKTAPDYLVGQNPPEDISSNRIYRILEMNGYDPQYAASVFLGWAQKKFGKRNTIWLFGPATTGKTNIAEAIAHAVPFYGCVNWTNENFPFNDCVDKMVIWWEEGKMTAKVVESAKAILGGSKVRVDQKCKSSAQIDPTPVIVTSNTNMCAVIDGNSTTFEHQQPLQDRMFKFELTKRLEHDFGKVTKQEVKDFFRWASDHVTEVTHEFYVRKGGARKRPAPNDADISEPKRACPSVAQPSTSDAEAPVDYADRYQNKCSRHVGMNLMLFPCRQCERMNQNVDICFTHGVMDCAECFPVSESQPVSVVRKRTYQKLCPIHHIMGRAPEVACSACELANVDLDDCDMEQ

SEQ ID NO: 63 - protein, 537 aa, Adeno-associated virus 4
  MOD_RES (537)..(537): Unknown
MPGFYEIVLKVPSDLDEHLPGISDSFVSWVAEKEWELPPDSDMDLNLIEQAPLTVAEKLQREFLVEWRRVSKAPEALFFVQFEKGDSYFHLHILVETVGVKSMVVGRYVSQIKEKLVTRIYRGVEPQLPNWFAVTKTRNGAGGGNKVVDDCYIPNYLLPKTQPELQWAWTNMDQYISACLNLAERKRLVAQHLTHVSQTQEQNKENQNPNSDAPVIRSKTSARYMELVGWLVDRGITSEKQWIQEDQASYISFNAASNSRSQIKAALDNASKIMSLTKTAPDYLVGQNPPEDISSNRIYRILEMNGYDPQYAASVFLGWAQKKFGKRNTIWLFGPATTGKTNIAEAIAHAVPFYGCVNWTNENFPFNDCVDKMVIWWEEGKMTAKVVESAKAILGGSKVRVDQKCKSSAQIDPTPVIVTSNTNMCAVIDGNSTTFEHQQPLQDRMFKFELTKRLEHDFGKVTKQEVKDFFRWASDHVTEVTHEFYVRKGGARKRPAPNDADISEPKRACPSVAQPSTSDAEAPVDYADRLARGQPLX

SEQ ID NO: 64 - protein, 623 aa, Adeno-associated virus 4; identical to SEQ ID NO: 62

SEQ ID NO: 65 - protein, 544 aa, Adeno-associated virus 4
MSDDSEMRAAAGGAAVEGGQGADGVGNASGDWHCDSTWSEGHVTTTSTRTWVLPTYNNHLYKRLGESLQSNTYNGFSTPWGYFDFNRFHCHFSPRDWQRLINNNWGMRPKAMRVKIFNIQVKEVTTSNGETTVANNLTSTVQIFADSSYELPYVMDAGQEGSLPPFPNDVFMVPQYGYCGLVTGNTSQQQTDRNAFYCLEYFPSQMLRTGNNFEITYSFEKVPFHSMYAHSQSLDRLMNPLIDQYLWGLQSTTTGTTLNAGTATTNFTKLRPTNFSNFKKNWLPGPSIKQQGFSKTANQNYKIPATGSDSLIKYETHSTLDGRWSALTPGPPMATAGPADSKFSNSQLIFAGPKQNGNTATVPGTLIFTSEEELAATNATDTDMWGNLPGGDQSNSNLPTVDRLTALGAVPGMVWQNRDIYYQGPIWAKIPHTDGHFHPSPLIGGFGLKHPPPQIFIKNTPVPANPATTFSSTPVNSFITQYSTGQVSVQIDWEIQKERSKRWNPEVQFTSNYGQQNSLLWAPDAAGKYTEPRAIGTRYLTHHL

SEQ ID NO: 66 - protein, 734 aa, Adeno-associated virus 4
MTDGYLPDWLEDNLSEGVREWWALQPGAPKPKANQQHQDNARGLVLPGYKYLGPGNGLDKGEPVNAADAAALEHDKAYDQQLKAGDNPYLKYNHADAEFQQRLQGDTSFGGNLGRAVFQAKKRVLEPLGLVEQAGETAPGKKRPLIESPQQPDSSTGIGKKGKQPAKKKLVFEDETGAGDGPPEGSTSGAMSDDSEMRAAAGGAAVEGGQGADGVGNASGDWHCDSTWSEGHVTTTSTRTWVLPTYNNHLYKRLGESLQSNTYNGFSTPWGYFDFNRFHCHFSPRDWQRLINNNWGMRPKAMRVKIFNIQVKEVTTSNGETTVANNLTSTVQIFADSSYELPYVMDAGQEGSLPPFPNDVFMVPQYGYCGLVTGNTSQQQTDRNAFYCLEYFPSQMLRTGNNFEITYSFEKVPFHSMYAHSQSLDRLMNPLIDQYLWGLQSTTTGTTLNAGTATTNFTKLRPTNFSNFKKNWLPGPSIKQQGFSKTANQNYKIPATGSDSLIKYETHSTLDGRWSALTPGPPMATAGPADSKFSNSQLIFAGPKQNGNTATVPGTLIFTSEEELAATNATDTDMWGNLPGGDQSNSNLPTVDRLTALGAVPGMVWQNRDIYYQGPIWAKIPHTDGHFHPSPLIGGFGLKHPPPQIFIKNTPVPANPATTFSSTPVNSFITQYSTGQVSVQIDWEIQKERSKRWNPEVQFTSNYGQQNSLLWAPDAAGKYTEPRAIGTRYLTHHL

SEQ ID NO: 67 - protein, 598 aa, Adeno-associated virus 4
TAPGKKRPLIESPQQPDSSTGIGKKGKQPAKKKLVFEDETGAGDGPPEGSTSGAMSDDSEMRAAAGGAAVEGGQGADGVGNASGDWHCDSTWSEGHVTTTSTRTWVLPTYNNHLYKRLGESLQSNTYNGFSTPWGYFDFNRFHCHFSPRDWQRLINNNWGMRPKAMRVKIFNIQVKEVTTSNGETTVANNLTSTVQIFADSSYELPYVMDAGQEGSLPPFPNDVFMVPQYGYCGLVTGNTSQQQTDRNAFYCLEYFPSQMLRTGNNFEITYSFEKVPFHSMYAHSQSLDRLMNPLIDQYLWGLQSTTTGTTLNAGTATTNFTKLRPTNFSNFKKNWLPGPSIKQQGFSKTANQNYKIPATGSDSLIKYETHSTLDGRWSALTPGPPMATAGPADSKFSNSQLIFAGPKQNGNTATVPGTLIFTSEEELAATNATDTDMWGNLPGGDQSNSNLPTVDRLTALGAVPGMVWQNRDIYYQGPIWAKIPHTDGHFHPSPLIGGFGLKHPPPQIFIKNTPVPANPATTFSSTPVNSFITQYSTGQVSVQIDWEIQKERSKRWNPEVQFTSNYGQQNSLLWAPDAAGKYTEPRAIGTRYLTHHL

SEQ ID NO: 68 - DNA, 129 bp, Adeno-associated virus 4
ttggccactccctctatgcgcgctcgctcactcactcggccctgcggccagaggccggcagtctggagacctttggtgtccagggcagggccgagtgagtgagcgagcgcgcatagagggagtggccaa

SEQ ID NO: 69 - DNA, 125 bp, Adeno-associated virus 4
ttggccactccctctatgcgcgctcgctcactcactcggccctggagaccaaaggtctccagactgccggcctctggccggcagggccgagtgagtgagcgagcgcgcatagagggagtggccaa

SEQ ID NO: 70 - DNA, 4768 bp, Adeno-associated virus 4
  modified_base (3009)..(3009): Unknown
ttggccactccctctatgcgcgctcgctcactcactcggccctggagaccaaaggtctccagactgccggcctctggccggcagggccgagtgagtgagcgagcgcgcatagagggagtggccaactccatcatctaggtttgcccactgacgtcaatgtgacgtcctagggttagggaggtccctgtattagcagtcacgtgagtgtcgtatttcgcggagcgtagcggagcgcataccaagctgccacgtcacagccacgtggtccgtttgcgacagtttgcgacaccatgtggtcaggagggtatataaccgcgagtgagccagcgaggagctccattttgcccgcgaattttgaacgagcagcagccatgccggggttctacgagatcgtgctgaaggtgcccagcgacctggacgagcacctgcccggcatttctgactcttttgtgagctgggtggccgagaaggaatgggagctgccgccggattctgacatggacttgaatctgattgagcaggcacccctgaccgtggccgaaaagctgcaacgcgagttcctggtcgagtggcgccgcgtgagtaaggccccggaggccctcttctttgtccagttcgagaagggggacagctacttccacctgcacatcctggtggagaccgtgggcgtcaaatccatggtggtgggccgctacgtgagccagattaaagagaagctggtgacccgcatctaccgcggggtcgagccgcagcttccgaactggttcgcggtgaccaagacgcgtaatggcgccggaggcgggaacaaggtggtggacgactgctacatccccaactacctgctccccaagacccagcccgagctccagtgggcgtggactaacatggaccagtatataagcgcctgtttgaatctcgcggagcgtaaacggctggtggcgcagcatctgacgcacgtgtcgcagacgcaggagcagaacaaggaaaaccagaaccccaattctgacgcgccggtcatcaggtcaaaaacctccgccaggtacatggagctggtcgggtggctggtggaccgcgggatcacgtcagaaaagcaatggatccaggaggaccaggcgtcctacatctccttcaacgccgcctccaactcgcggtcacaaatcaaggccgcgctggacaatgcctccaaaatcatgagcctgacaaagacggctccggactacctggtgggccagaacccgccggaggacatttccagcaaccgcatctaccgaatcctcgagatgaacgggtacgatccgcagtacgcggcctccgtcttcctgggctgggcgcaaaagaagttcgggaagaggaacaccatctggctctttgggccggccacgacgggtaaaaccaacatcgcggaagccatcgcccacgccgtgcccttctacggctgcgtgaactggaccaatgagaactttccgttcaacgattgcgtcgacaagatggtgatctggtgggaggagggcaagatgacggccaaggtcgtagagagcgccaaggccatcctgggcggaagcaaggtgcgcgtggaccaaaagtgcaagtcatcggcccagatcgacccaactcccgtgatcgtcacctccaacaccaacatgtgcgcggtcatcgacggaaactcgaccaccttcgagcaccaacaaccactccaggaccggatgttcaagttcgagctcaccaagcgcctggagcacgactttggcaaggtcaccaagcaggaagtcaaagactttttccggtgggcgtcagatcacgtgaccgaggtgactcacgagttttacgtcagaaagggtggagctagaaagaggcccgcccccaatgacgcagatataagtgagcccaagcgggcctgtccgtcagttgcgcagccatcgacgtcagacgcggaagctccggtggactacgcggacaggtaccaaaacaaatgttctcgtcacgtgggtatgaatctgatgctttttccctgccggcaatgcgagagaatgaatcagaatgtggacatttgcttcacgcacggggtcatggactgtgccgagtgcttccccgtgtcagaatctcaacccgtgtctgtcgtcagaaagcggacgtatcagaaactgtgtccgattcatcacatcatggggagggcgcccgaggtggcctgctcggcctgcgaactggccaatgtggacttggatgactgtgacatggaacaataaatgactcaaaccagatatgactgacggttaccttccagattggctagaggacaacctctctgaaggcgttcgagagtggtgggcgctgcaacctggagcccctaaacccaaggcaaatcaacaacatcaggacaacgctcggggtcttgtgcttccgggttacaaatacctcggacccggcaacggactcgacaagggggaacccgtcaacgcagcggacgcggcagccctcgagcacgacaaggcctacgaccagcagctcaaggccggtgacaacccctacctcaagtacaaccacgccgacgcggagttccagcagcggcttcagggcgacacaccgtttgggggcaacctcggcagagcagtcttccaggccaaaaagagggttcttgaacctcttggtctggttgagcaagcgggtgagacggctcctggaaagaagagaccgttgattgaatccccccagcagcccgactcctccacgggtatcggcaaaaaaggcaagcagccggctaaaaagaagctcgttttcgaagacgaaactggagcaggcgacggaccccctgagggatcaacttccggagccatgtctgatgacagtgagatgcgtgcagcagctggcggagctgcagtcgagggsggacaaggtgccgatggagtgggtaatgcctcgggtgattggcattgcgattccacctggtctgagggccacgtcacgaccaccagcaccagaacctgggtcttgcccacctacaacaaccacctntacaagcgactcggagagagcctgcagtccaacacctacaacggattctccaccccctggggatactttgacttcaaccgcttccactgccacttctcaccacgtgactggcagcgactcatcaacaacaactggggcatgcgacccaaagccatgcgggtcaaaatcttcaacatccaggtcaaggaggtcacgacgtcgaacggcgagacaacggtggctaataaccttaccagcacggttcagatctttgcggactcgtcgtacgaactgccgtacgtgatggatgcgggtcaagagggcagcctgcctccttttcccaacgacgtctttatggtgccccagtacggctactgtggactggtgaccggcaacacttcgcagcaacagactgacagaaatgccttctactgcctggagtactttccttcgcagatgctgcggactggcaacaactttgaaattacgtacagttttgagaaggtgcctttccactcgatgtacgcgcacagccagagcctggaccggctgatgaaccctctcatcgaccagtacctgtggggactgcaatcgaccaccaccggaaccaccctgaatgccgggactgccaccaccaactttaccaagctgcggcctaccaacttttccaactttaaaaagaactggctgcccgggccttcaatcaagcagcagggcttctcaaagactgccaatcaaaactacaagatccctgccaccgggtcagacagtctcatcaaatacgagacgcacagcactctggacggaagatggagtgccctgacccccggacctccaatggccacggctggacctgcggacagcaagttcagcaacagccagctcatctttgcggggcctaaacagaacggcaacacggccaccgtacccgggactctgatcttcacctctgaggaggagctggcagccaccaacgccaccgatacggacatgtggggcaacctacctggcggtgaccagagcaacagcaacctgccgaccgtggacagactgacagccttgggagccgtgcctggaatggtctggcaaaacagagacatttactaccagggtcccatttgggccaagattcctcataccgatggacactttcacccctcaccgctgattggtgggtttgggctgaaacacccgcctcctcaaatttttatcaagaacaccccggtacctgcgaatcctgcaacgaccttcagctctactccggtaaactccttcattactcagtacagcactggccaggtgtcggtgcagattgactgggagatccagaaggagcggtccaaacgctggaaccccgaggtccagtttacctccaactacggacagcaaaactctctgttgtgggctcccgatgcggctgggaaatacactgagcctagggctatcggtacccgctacctcacccaccacctgtaataacctgttaatcaataaaccggtttattcgtttcagttgaactttggtctccgtgtccttcttatcttatctcgtttccatggctactgcgtacataagcagcggcctgcggcgcttgcgcttcgcggtttacaactgccggttaatcagtaacttctggcaaaccatgatgatggagttggccactccctctatgcgcgctcgctcactcactcggccctggagaccaaaggtctccagactgccggcctctggccggcagggccgagtgagtgagcgagcgcgcatagagggagtggccaa

SEQ ID NO: 71 - DNA, 3098 bp, Adeno-associated virus
gaattcgccctttctacggctgcgtcaactggaccaatgagaactttcccttcaacgattgcgtcgacaagatggtgatctggtgggaggagggcaagatgacggccaaggtcgtggagtccgccaaggccattctcggcggcagcaaggtgcgcgtggaccaaaagtgcaagtcttccgcccagatcgatcccacccccgtgatcgtcacttccaacaccaacatgtgcgctgtgattgacgggaacagcaccaccttcgagcaccagcagccgttacaagaccggatgttcaaatttgaactcacccgccgtctggagcacgactttggcaaggtgacaaagcaggaagtcaaagagttcttccgctgggcgcaggatcacgtgaccgaggtggcgcatgagttctacgtcagaaagggtggagccaacaagagacccgcccccgatgacgcggataaaagcgagcccaagcgggcctgcccctcagtcgcggatccatcgacgtcagacgcggaaggagctccggtggactttgccgacaggtaccaaaacaaatgttctcgtcacgcgggcatgcttcagatgctgtttccctgcaagacatgcgagagaatgaatcagaatttcaacatttgcttcacgcacgggaccagagactgttcagaatgtttccccggcgtgtcagaatctcaaccggtcgtcagaaagaggacgtatcggaaactctgtgccattcatcatctgctggggcgggctcccgagattgcttgctcggcctgcgatctggtcaacgtggacctggatgaccgtgtttctgagcaataaatgacttaaaccaggtatggctgccgatggttatcttccagattggctcgaggacaacctctctgagggcattcgcgagtggtgggacttgaaacctggagccccgaaacccaaagccaaccagcaaaagcaggacgacggccggggtctggtgcttcctggctacaagtacctcggacccttcaacggactcgacaagggagagccggtcaacgaggcagacgccgcggccctcgagcacgacaaggcctacgacaagcagctcgagcagggggacaacccgtacctcaagtacaaccacgccgacgccgagtttcaggagcgtcttcaagaagatacgtcttttgggggcaacctcgggcgagcagtcttccaggccaagaagcgggttctcgaacctctcggtctggttgaggaaggcgctaagacggctcctggaaagaagagacccatagaatcccccgactcctccacgggcatcggcaagaaaggccagcagcccgctaaaaagaagctcaactttgggcagactggcgactcagagtcagtgcccgacccccaacctctcggagaacctcccgccgcgccctcaggtctgggatctggtacaatggctgcaggcggtggcgcaccaatggcagacaataacgaaggcgccgacggagtgggtaatgcctccggaaattggcattgcgattccacatggctgggcgacagagtcatcaccaccagcacccgcacctgggccctgcccacctacaacaaccacctctacaagcagatatcaagtcagagcggggctaccaacgacaaccacttcttcggctacagcaccccctggggctattttgacttcaacagattccactgccacttctcaccacgtgactggcagcgactcatcaacaacaactggggattccggcccagaaagctgcggttcaagttgttcaacatccaggtcaaggaggtcacgacgaacgacggcgttacgaccatcgctaataaccttaccagcacgattcaggtcttctcggactcggagtaccaactgccgtacgtcctcggctctgcgcaccagggctgcctccctccgttccctgcggacgtgttcatgattcctcagtacggatatctgactctaaacaacggcagtcagtctgtgggacgttcctccttctactgcctggagtactttccttctcagatgctgagaacgggcaataactttgaattcagctacacctttgaggaagtgcctttccacagcagctatgcgcacagccagagcctggaccggctgatgaatcccctcatcgaccagtacctgtactacctggcccggacccagagcactacggggtccacaagggagctgcagttccatcaggctgggcccaacaccatggccgagcaatcaaagaactggctgcccggaccctgttatcggcagcagagactgtcaaaaaacatagacagcaacaacaacagtaactttgcctggaccggggccactaaataccatctgaatggtagaaattcattaaccaacccgggcgtagccatggccaccaacaaggacgacgaggaccagttctttcccatcaacggagtgctggtttttggcgaaacgggggctgccaacaagacaacgctggaaaacgtgctaatgaccagcgaggaggagatcaaaaccaccaatcccgtggctacagaagaatacggtgtggtctccagcaacctgcaatcgtctacggccggaccccagacacagactgtcaacagccagggggctctgcccggcatggtctggcagaaccgggacgtgtacctgcagggtcccatctgggccaaaattcctcacacggacggcaactttcacccgtctcccctgatgggcggatttggactcaaacacccgcctcctcaaattctcatcaaaaacaccccggtacctgctaatcctccagaggtgtttactcctgccaagtttgcctcatttatcacgcagtacagcaccggccaggtcagcgtggagatcgagtgggaactgcagaaagaaaacagcaaacgctggaatccagagattcagtacacctcaaattatgccaagtctaataatgtggaatttgctgtcaacaacgaaggggtttatactgagcctcgccccattggcacccgttacctcacccgtaacctgtaattgcctgttaatcaataaaccggttaattcgtttcagttgaactttggtctctgcgaagggcgaattc

SEQ ID NO: 72 - protein, 728 aa, Artificial Sequence
  Description of Artificial Sequence: Synthetic polypeptide
MAADGYLPDWLEDNLSEGIREWWDLKPGAPKPKANQQKQDDGRGLVLPGYKYLGPFNGLDKGEPVNEADAAALEHDKAYDKQLEQGDNPYLKYNHADAEFQERLQEDTSFGGNLGRAVFQAKKRVLEPLGLVEEGAKTAPGKKRPIESPDSSTGIGKKGQQPAKKKLNFGQTGDSESVPDPQPLGEPPAAPSGLGSGTMAAGGGAPMADNNEGADGVGNASGNWHCDSTWLGDRVITTSTRTWALPTYNNHLYKQISSQSGATNDNHFFGYSTPWGYFDFNRFHCHFSPRDWQRLINNNWGFRPRKLRFKLFNIQVKEVTTNDGVTTIANNLTSTIQVFSDSEYQLPYVLGSAHQGCLPPFPADVFMIPQYGYLTLNNGSQSVGRSSFYCLEYFPSQMLRTGNNFEFSYTFEEVPFHSSYAHSQSLDRLMNPLIDQYLYYLARTQSTTGSTRELQFHQAGPNTMAEQSKNWLPGPCYRQQRLSKNIDSNNNSNFAWTGATKYHLNGRNSLTNPGVAMATNKDDEDQFFPINGVLVFGETGAANKTTLENVLMTSEEEIKTTNPVATEEYGVVSSNLQSSTAGPQTQTVNSQGALPGMVWQNRDVYLQGPIWAKIPHTDGNFHPSPLMGGFGLKHPPPQILIKNTPVPANPPEVFTPAKFASFITQYSTGQVSVEIEWELQKENSKRWNPEIQYTSNYAKSNNVEFAVNNEGVYTEPRPIGTRYLTRNL

SEQ ID NO: 73 - DNA, 2495 bp, Artificial Sequence
  Description of Artificial Sequence: Synthetic polynucleotide
gaattcgccctttctacggctgcgtcaactagaccaatgagaactttcccttcaacgattgcgtcgacaagatggtgatctggtgggaggagggcaagatgacggccaaggtcgtggagtccgccaaggccattcatcatctgctggggcgggctcccgagattgcttgctcggcctgcgatctggtcaacgtggacctggatgactgtgtttctgagcaataaatgacttaaaccaggtatggctgccgatggttatcttccagattggctcgaggacaacctctctgagggcattcgcgagtggtgggacttgaaacctggagccccgaaacccaaagccaaccagcaaaagcaggacgacggccggggtctggtgcttcctggctacaagtacctcggacccttcaacggactcgacaagggagagccggtcaacgaggcagacgccgcggccctcgagcacgacaaggcctacgacaagcagctcgagcagggggacaacccgtacctcaagtacaaccacgccgacgccgagtttcaggagcgtcttcaagaagatacgtcttttgggggcaacctcgggcgagcagtcttccaggccaagaagcgggttctcgaacctctcggtctggttgaggaaggcgctaagacggctcctggaaagaagagacccatagaatcccccgactcctccacgggcatcggcaagaaaggccagcagcccgctaaaaagaagctcaactttgggcagactggcgactcagagtcagtgcccgaccctcaaccaatcggagaaccccccgcaggcccctctggtctgggatctggtacaatggctgcaggcggtggcgctccaatggcagacaataacgaaggcgccgacggagtgggtaatgcctccggaaattggcattgcgattccacatggctgggcgacagagtcatcaccaccagcacccgcacctgggccctgcccacctacaacaaccacctctacaagcagatatcaagtcagagcggggctaccaacgacaaccacttcttcggctacagcaccccctggggctattttgacttcaacagattccactgccacttctcaccacgtgactggcagcgactcatcaacaacaactggggattccggcccagaaagctgcggttcaagttgttcaacatccaggtcaaggaggtcacgacgaacgacggcgttacgaccatcgctaataaccttaccagcacgattcaggtcttctcggactcggagtaccaactgccgtacgtcctcggctctgcgcaccagggctgcctccctccgttccctgcggacgtgttcatgattcctcagtacggatatctgactctaaacaacggcagtcagtctgtgggacgttcctccttctactgcctggagtactttccttctcagatgctgagaacgggcaataactttgaattcagctacacctttgaggaagtgcctttccacagcagctatgcgcacagccagagcctggaccggctgatgaatcccctcatcgaccagtacctgtactacctggcccggacccagagcactacggggtccacaagggagctgcagttccatcaggctgggcccaacaccatggccgagcaatcaaagaactggctgcccggaccctgttatcggcagcagagactgtcaaaaaacatagacagcaacaacaccagtaactttgcctggaccggggccactaaataccatctgaatggtagaaattcattaaccaacccgggcgtagccatggccaccaacaaggacgacgaggaccagttctttcccatcaacggagtgctggtttttggcaaaacgggggctgccaacaagacaacgctggaaaacgtgctaatgaccagcgaggaggagatcaaaaccaccaatcccgtggctacagaacagtacggtgtggtctccagcaacctgcaatcgtctacggccggaccccagacacagactgtcaacagccagggggctctgcccggcatggtctggcagaaccgggacgtgtacctgcagggtcccatctgggccaaaattcctcacacggacggcaactttcacccgtctcccctgatgggcggatttggactcaaacacccgcctcctcaaattctcatcaaaaacaccccggtacctgctaatcctccagaggtgtttactcctgccaagtttgcctcatttatcacgcagtacagcaccggccaggtcagcgtggagatcgagtgggaactgcagaaagaaaacagcaaacgctggaatccagagattcagtacacctcaaattatgccaagtctaataatgtggaatttgctgtcaacaacgaaggggtttatactgagcctcgccccattggcacccgttacctcacccgtaacctgtaattgcctgttaatcaataaaccggttaattcgtttcagttgaactttggtctctgcgaagggcgaattc

SEQ ID NO: 74 - protein, 728 aa, Artificial Sequence
  Description of Artificial Sequence: Synthetic polypeptide
MAADGYLPDWLEDNLSEGIREWWDLKPGAPKPKANQQKQDDGRGLVLPGYKYLGPFNGLDKGEPVNEADAAALEHDKAYDKQLEQGDNPYLKYNHADAEFQERLQEDTSFGGNLGRAVFQAKKRVLEPLGLVEEGAKTAPGKKRPIESPDSSTGIGKKGQQPAKKKLNFGQTGDSESVPDPQPIGEPPAGPSGLGSGTMAAGGGAPMADNNEGADGVGNASGNWHCDSTWLGDRVITTSTRTWALPTYNNHLYKQISSQSGATNDNHFFGYSTPWGYFDFNRFHCHFSPRDWQRLINNNWGFRPRKLRFKLFNIQVKEVTTNDGVTTIANNLTSTIQVFSDSEYQLPYVLGSAHQGCLPPFPADVFMIPQYGYLTLNNGSQSVGRSSFYCLEYFPSQMLRTGNNFEFSYTFEEVPFHSSYAHSQSLDRLMNPLIDQYLYYLARTQSTTGSTRELQFHQAGPNTMAEQSKNWLPGPCYRQQRLSKNIDSNNTSNFAWTGATKYHLNGRNSLTNPGVAMATNKDDEDQFFPINGVLVFGKTGAANKTTLENVLMTSEEEIKTTNPVATEQYGVVSSNLQSSTAGPQTQTVNSQGALPGMVWQNRDVYLQGPIWAKIPHTDGNFHPSPLMGGFGLKHPPPQILIKNTPVPANPPEVFTPAKFASFITQYSTGQVSVEIEWELQKENSKRWNPEIQYTSNYAKSNNVEFAVNNEGVYTEPRPIGTRYLTRNL

SEQ ID NO: 75 - DNA, 2504 bp, Artificial Sequence
  Description of Artificial Sequence: Synthetic polynucleotide
gaattcgccctttctacggctgcgtcaactggaccaatgagaactttcccttcaacgattgcgtcgacaagatggtgatctggtgggaggagggcaagatgacggccaaggtcgtggagtccgccaaggccattcatcatctgctggggcgggctcccgagattgcttgctcggcctgcgatctggtcaacgtggacctggatgactgtgtttctgagcaataaatgacttaaaccaggtatggctgccgatggttatcttccagattggctcgaggacaacctctctgagggcattcgcgagtggtgggacttgaaacctggagccccgaaacccaaagccaaccagcaaaagcaggacgacggccggggtctggtgcttcctggctacaagtacctcggacccttcaacggactcgacaagggagagccggtcaacgaggcagacgccgcggccctcgagcacgacaaggcctacgacaagcagctcgagcagggggacaacccgtacctcaagtacaaccacgccgacgccgagtttcaggagcgtcttcaagaagatacgtcttttgggggcaacctcgggcgagcagtcttccaggccaagaagcgggttctcgaacctctcggtctggttgaggaaggcgctaagacggctcctggaaagaagagacccatagaatcccccgactcctccacgggcatcggcaagaaaggccagcagcccgctaaaaagaagctcaactttgggcagactggcgactcagagtcagtgcccgaccctcaaccaatcggagaaccccccgcaggcccctctggtctgggatctggtacaatggctgcaggcggtggcgctccaatggcagacaataacgaaggcgccgacggagtgggtaatgcctccggaaattggcattgcgattccacatggctgggcgacagagtcatcaccaccagcacccgcacctgggccctgcccacctacaacaaccacctctacaagcagatatcaagtcagagcggggctaccaacgacaaccacttcttcggctacagcaccccctggggctattttgacttcaacagattccactgccacttctcatcacgtgactggcagcgactcatcaacaacaactggggattccggcccaagagactcaacttcaagctcttcaacatccaggtcaaggaggtcacgcagaatgaaggcaccaagaccatcgccaataaccttaccagcacgattcaggtctttacggactcggaataccggctcccgtacgtcctcggctctgcgcaccagggctgcctgcctccgttcccggcggacgtcttcatgattcctcagtacgggtacctgactctgaacaacggcagtcaggccgtgggccgttcctccttctactgcctggagtactttccttctcaaatgctgagaacgggcaacaactttgagttcagctaccagtttgaggacgtgccttttcacagcagctacgcgcacagccaaagcctggaccggctgatgaaccccctcatcgaccagtacctgtactacctgtctcggactcagtccacgggaggtaccgcaggaactcagcagttgctattttctcaggccgggcctaataacatgtcggctcaggccaaaaactggctacccgggccctgctaccggcagcaacgcgtctccacgacactgtcgcaaaataacaacagcaactttgcttggaccggtgccaccaagtatcatctgaatggcagagactctctggtaaatcccggtgtcgctatggcaacgcacaaggacgacgaagagcgattttttccatccagcggagtcttgatgtttgggaaacagggagctggaaaagacaacgtggactatagcagcgttatgctaaccagtgaggaagaaatcaaaaccaccaacccagtggccacagaacagtacggcgtggtggccgataacctgcaacagcaaaacgccgctcctattgtaggggccgtcaacagtcaaggagccttacctggcatggtctggcagaaccgggacgtgtacctgcagggtcctatctgggccaagattcctcacacggacggcaactttcatccttcgccgctgatgggaggctttggactgaaacacccgcctcctcagatcctgattaagaatacacctgttcccgcggatcctccaactaccttcagtcaagccaagccggcgtcgttcatcacgcagtacagcaccggacaggtcagcgtggaaattgaatgggagctgcagaaagagaacagcaagcgctggaacccagagattcagtatacttccaactactacaaatctacaaatgtggactttgctgtcaatactgagggtacttattcagagcctcgccccattggcacccgttacctcacccgtaacctgtaattgcctgttaatcaataaaccggttaattcgtttcagttgaactttggtctctgcgaagggcgaattc

SEQ ID NO: 76 - protein, 731 aa, Artificial Sequence
  Description of Artificial Sequence: Synthetic polypeptide
MAADGYLPDWLEDNLSEGIREWWDLKPGAPKPKANQQKQDDGRGLVLPGYKYLGPFNGLDKGEPVNEADAAALEHDKAYDKQLEQGDNPYLKYNHADAEFQERLQEDTSFGGNLGRAVFQAKKRVLEPLGLVEEGAKTAPGKKRPIESPDSSTGIGKKGQQPAKKKLNFGQTGDSESVPDPQPIGEPPAGPSGLGSGTMAAGGGAPMADNNEGADGVGNASGNWHCDSTWLGDRVITTSTRTWALPTYNNHLYKQISSQSGATNDNHFFGYSTPWGYFDFNRFHCHFSSRDWQRLINNNWGFRPKRLNFKLFNIQVKEVTQNEGTKTIANNLTSTIQVFTDSEYRLPYVLGSAHQGCLPPFPADVFMIPQYGYLTLNNGSQAVGRSSFYCLEYFPSQMLRTGNNFEFSYQFEDVPFHSSYAHSQSLDRLMNPLIDQYLYYLSRTQSTGGTAGTQQLLFSQAGPNNMSAQAKNWLPGPCYRQQRVSTTLSQNNNSNFAWTGATKYHLNGRDSLVNPGVAMATHKDDEERFFPSSGVLMFGKQGAGKDNVDYSSVMLTSEEEIKTTNPVATEQYGVVADNLQQQNAAPIVGAVNSQGALPGMVWQNRDVYLQGPIWAKIPHTDGNFHPSPLMGGFGLKHPPPQILIKNTPVPADPPTTFSQAKPASFITQYSTGQVSVEIEWELQKENSKRWNPEIQYTSNYYKSTNVDFAVNTEGTYSEPRPIGTRYLTRNL

SEQ ID NO: 77 - DNA, 3128 bp, Artificial Sequence
  Description of Artificial Sequence: Synthetic polynucleotide
gaattcgccctttctacggctgcgtcaactggaccaatgagaactttcccttcaacgattgcgtcgacaagatggtgatctggtgggaggagggcaagatgacggccaaggtcgtggagtccgccaaggccattctcggcggcagcaaggtgcgcgtggaccaaaagtgcaagtcttccgcccagatcgatcccacccccgtgatcgtcacttccaacaccaacatgtgcgccgtgattgacgggaacagcaccaccttcgagcaccagcagccgttacaagaccggatgttcaaatttgaactcacccgccgtctggagcacgactttggcaaggtgacaaagcaggaagtcaaagagttcttccgctgggcgcaggatcacgtgaccgaggtggcgcatgagttctacgtcagaaagggtggagccaacaagagacccgcccccgatgacgcggataaaagcgagcccaagcgggcctgcccctcagtcgcggatccatcgacgtcagacgcggaaggagctccggtggactttgccgacaggtaccaaaacaaatgttctcgtcacgcgggcatgcttcagatgctgtttccctgcaagacatgcgagagaatgaatcagaatttcaacatttgcttcacgcacgggaccagagactgttcagaatgtttccccggcgtgtcagaatctcaaccggtcgtcagaaagaggacgtatcggaaactctgtgccattcatcatctgctagggcgggctcccgagattgcttgctcggcctgcgatctggtcaacgtggacctggatgactgtgtttctgagcaataaatgacttaaaccaggtatggctgccgatggttatcttccagattggctcgaggacaacctctctgagggcattcgcgagtggtgggacttgaaacctggagccccgaaacccaaagccaaccagcaaaagcaggacgacggccggggtctggtgcttcctggctacaagtacctcggacccttcaacggactcgacaagggggagcccgtcaacgcggcggacgcagcggccctcgagcacgacaaggcctacgaccagcagctcaaagcgggtgacaatccgtacctgcggtataaccacgccgacgccgagtttcaggagcgtctgcaagaagatacgtcttttgggggcaacctcgggcgagcagtcttccaggccaagaagcgggttctcgaacctctcggtctggttgaggaaggcgctaagacggctcctggaaagaagagaccggtagagccatcaccccagcgttctccagactcctctacgggcatcggcaagacaggccagcagcccgcgaaaaagagactcaactttgggcagactggcgactcagagtcagtgcccgaccctcaaccaatcggagaaccccccgcaggcccctctggtctgggatctggtacaatggctgcaggcggtggcgctccaatggcagacaataacgaaggcgccgacggagtgggtagttcctcaggaaattggcattgcgattccacatggctgggcgacagagtcatcaccaccagcacccgaacctgggccctccccacctacaacaaccacctctacaagcaaatctccaacgggacatcgggaggaagcaccaacgacaacacctacttcggctacagcaccccctgggggtattttgactttaacagattccactgccacttctcaccacgtgactggcagcgactcatcaacaacaactggggattccggcccaagagactcaacttcaagctcttcaacatccaggtcaaggaggtcacgcagaatgaaggcaccaagaccatcgccaataaccttaccagcacgattcaggtctttacggactcggaataccagctcccgtacgtcctcggctctgcgcaccagggctgcctgcctccgttcccggcggacgtcttcatgattcctcagtacgggtacctgactctgaacaacggcagtcaggccgtgggccgttcctccttctactgcctggagtactttccttctcaaatgctgagaacgggcaacaactttgagttcagctaccagtttgaggacgtgccttttcacagcagctacgcgcacagccaaagcctggaccggctgatgaaccccctcatcgaccagtacctgtactacctgtctcggactcagtccacgggaggtaccgcaggaactcagcagttgctattttctcaggccgggcctaataacatgtcggctcaggccaaaaactggctacccgggccctgctaccggcagcaacgcgtctccacgacactgtcgcaaaataacaacagcaactttgcttggaccggtgccaccaagtatcatctgaatggcagagactctctggtaaatcccggtgtcgctatggcaacgcacaaggacgacgaagagcgattttttccatccagcggagtcttgatgtttgggaaacagggagctggaaaagacaacgtggactatagcagcgttatgctaaccagtgaggaagaaatcaaaaccaccaacccagtggccacagaacagtacggcgtggtggccgataacctgcaacagcaaaacgccgctcctattgtaggggccgtcaacagtcaaggagccttacctggcatggtctggcagaaccgggacgtgtacctgcagggtcctatctgggccaagattcctcacacggacggcaactttcatccttcgccgctgatgggaggctttggactgaaacacccgcctcctcagatcctgattaagaatacacctgttcccgcggatcctccaactaccttcagtcaagccaagctggcgtcgttcatcacgcagtacagcaccggacaggtcagcgtggaaattgaatgggagctgcagaaagagaacagcaagcgctggaacccagagattcagtatacttccaactactacaaatctacaaatgtggactttgctgtcaatactgagggtacttattcagagcctcgccccattggcacccgttacctcacccgtaacctgtaattgcctgttaatcaataaaccggctaattcgtttcagttgaactttggtctctgcgaagggcgaattc

SEQ ID NO: 78 - protein, 738 aa, Artificial Sequence
  Description of Artificial Sequence: Synthetic polypeptide
MAADGYLPDWLEDNLSEGIREWWDLKPGAPKPKANQQKQDDGRGLVLPGYKYLGPFNGLDKGEPVNAADAAALEHDKAYDQQLKAGDNPYLRYNHADAEFQERLQEDTSFGGNLGRAVFQAKKRVLEPLGLVEEGAKTAPGKKRPVEPSPQRSPDSSTGIGKTGQQPAKKRLNFGQTGDSESVPDPQPIGEPPAGPSGLGSGTMAAGGGAPMADNNEGADGVGSSSGNWHCDSTWLGDRVITTSTRTWALPTYNNHLYKQISNGTSGGSTNDNTYFGYSTPWGYFDFNRFHCHFSPRDWQRLINNNWGFRPKRLNFKLFNIQVKEVTQNEGTKTIANNLTSTIQVFTDSEYQLPYVLGSAHQGCLPPFPADVFMIPQYGYLTLNNGSQAVGRSSFYCLEYFPSQMLRTGNNFEFSYQFEDVPFHSSYAHSQSLDRLMNPLIDQYLYYLSRTQSTGGTAGTQQLLFSQAGPNNMSAQAKNWLPGPCYRQQRVSTTLSQNNNSNFAWTGATKYHLNGRDSLVNPGVAMATHKDDEERFFPSSGVLMFGKQGAGKDNVDYSSVMLTSEEEIKTTNPVATEQYGVVADNLQQQNAAPIVGAVNSQGALPGMVWQNRDVYLQGPIWAKIPHTDGNFHPSPLMGGFGLKHPPPQILIKNTPVPADPPTTFSQAKLASFITQYSTGQVSVEIEWELQKENSKRWNPEIQYTSNYYKSTNVDFAVNTEGTYSEPRPIGTRYLTRNL

SEQ ID NO: 79 - DNA, 3084 bp, Artificial Sequence
  Description of Artificial Sequence: Synthetic polynucleotide
gaattcgccctttctacggctgcatcaactggaccaatgagaactttcccttcaacgattgcgtcgacaagatggtgatctggtgggaggagggcaagatgacggccaaggtcgtggagtccgccaaggccattctcggcggcagcaaggtgcgcgtggaccaaaagtgcaagtcgtccgcccagatcgaccccacccccgtgatcgtcacctccaacaccaacatgtgcgccgtgattgacgggaacagcaccaccttcgagcaccagcagccgttgcaggaccggatgttcaagttcgaactcacccgccgtctggagcacgactttggcaaggtgaccaagcaggaagtcaaagagttcttccgctgggcgcaggatcacgtgaccgaggtggcgcatgagttctacgtcagaaagggcggagccagcaaaagacccgcccccgatgacgcggatataagcgagcccaagcgggcctgcccctcagtcgcggatccatcgacgtcagacgcggaaggagctccggtggactttgccgacaggtaccaaaacaaatgttctcgtcacgcgggcatgcttcagatgctgtttccctgcaaaacgtgcgagaaaatgaatcagaatttcaacatttgcttcacgcacggggtcagagactgctcagaatgtttccccggtgcatcagaatctcaaccggtcgtcagaaaaaaaacgtatcagaaactgtgtgccattcatcatctgctggggcgggcacccgagattgcttgctcggcctgcgatctggtcaacgtggacctggacgactgtgtttctgagcaataaatgacttaaaccaggtatggctgccgatggttatcttccagattggcttgaggacaacctctctgagggcattcgcgagtggtgggacctgaaacctggagccccgaaacccaaagccaaccagcaaaagcaggacgacggccggggtctggtgcttcctggctacaagtacctcggacccttcaacggactcgacaagggggagcccgtcaacgcggcggacgcagcggccctcgagcacgacaaggcctacgaccagcagctcaaagcgggtgacaatccgtacctgcggtataaccacgccgacgccgagtttcaggagcgtctgcaagaagatacgtcttttgggggcaacctcgggcgagcagtcttccaggccaagaagcgggttctcgaacctctcggtctggttgaggaaggcgctaagacggctcctggaaagaagagaccggtagagccatcacctcagcgttcccccgactcctccacgggcatcggcaagaaaggccaccagcccgcgagaaagagactgaactttgggcagactggcgactcggagtcagtccccgaccctcaaccaatcggagaaccaccagcaggcccctctggtctgggatctggtacaatggctgcaggcggtggcgctccaatggcagacaataacgaaggcgccgacggagtgggtagttcctcaggaaattggcattgcgattccacatggctgggcgacagagtcatcaccaccagcacccgaacctgggccctgcccacctacaacaaccatctctacaagcaaatctccaacgggacatcgggaggaagcactaacgacaacacctactttggctacagcaccccctgggggtattttgacttcaacagattccactgccacttctcaccacgtgactggcagcgactcatcaacaataactggggattccggcccaagagactcaacttcaagctcttcaacatccaggtcaaggaggtcacgcagaatgaaggcaccaagaccatcgccaataaccttaccagcacgattcaggtgtttacggactcggaataccagctcccgtacgtccccggctctgcgcaccagggctgcctccctccgttcccggcggacgtcttcatgattcctcagtacgggtatctgaccctaaacaatggcagtcaggctgtgggccgttcctccttctactgcctggaatacttcccttctcaaatgctgaggacgggcaacaactttgaattcagctacaccttcgaggacgtgcctttccacagcagctacgcgcacagccagagcctggaccggctgatgaaccctctcatcgaccagtacctgtattacttatccagaactcagtccacaggaggaactcaaggtactcagcaattgttattttctcaagccgggcccgcaaacatgtcggctcaggccaagaactggctacctggaccgtgttaccgtcagcaacgagtttccacgacactgtcgcaaaacaacaacagcaattttgcttggaccggtgccaccaagtatcacctgaatggcagagactccctggttaatcccggcgttgccatggctacccacaaggacgacgaggagcgcttcttcccgtcaagcggagttctaatgtttggcaagcagggggctggaaaagacaatgtggactacagcagcgtgatgctcaccagcgaagaagaaattaaaactactaacccagtggctacagagcagtatggtgtggtggcagacaacctgcagcagaccaacggagctcccattgtgggaactgtcaacagccagggggccttacctggtatggtctggcaaaaccgggacgtgtacctgcagggccccatctgggccaaaattcctcacacggacggcaactttcatccttcgccgctgatgggaggctttggactgaaacacccgcctcctcagatcctggtgaaaaacactcctgttcctgcggatcctccgaccaccttcagccaggccaagctggcttcttttatcacgcagtacagcaccggacaggtcagcgtggaaatcgaatgggagctgcagaaagaaaacagcaagcgctggaacccagagattcagtatacttccaactactacaaatctacaaatgtggactttgctgtcaatactgagggtacttattcagagcctcgccccattggcactcgttatctcacccgtaatctgtaattgcttgttaatcaataaaccggt

SEQ ID NO: 80 - protein, 738 aa, Artificial Sequence
  Description of Artificial Sequence: Synthetic polypeptide
MAADGYLPDWLEDNLSEGIREWWDLKPGAPKPKANQQKQDDGRGLVLPGYKYLGPFNGLDKGEPVNAADAAALEHDKAYDQQLKAGDNPYLRYNHADAEFQERLQEDTSFGGNLGRAVFQAKKRVLEPLGLVEEGAKTAPGKKRPVEPSPQRSPDSSTGIGKKGHQPARKRLNFGQTGDSESVPDPQPIGEPPAGPSGLGSGTMAAGGGAPMADNNEGADGVGSSSGNWHCDSTWLGDRVITTSTRTWALPTYNNHLYKQISNGTSGGSTNDNTYFGYSTPWGYFDFNRFHCHFSPRDWQRLINNNWGFRPKRLNFKLFNIQVKEVTQNEGTKTIANNLTSTIQVFTDSEYQLPYVPGSAHQGCLPPFPADVFMIPQYGYLTLNNGSQAVGRSSFYCLEYFPSQMLRTGNNFEFSYTFEDVPFHSSYAHSQSLDRLMNPLIDQYLYYLSRTQSTGGTQGTQQLLFSQAGPANMSAQAKNWLPGPCYRQQRVSTTLSQNNNSNFAWTGATKYHLNGRDSLVNPGVAMATHKDDEERFFPSSGVLMFGKQGAGKDNVDYSSVMLTSEEEIKTTNPVATEQYGVVADNLQQTNGAPIVGTVNSQGALPGMVWQNRDVYLQGPIWAKIPHTDGNFHPSPLMGGFGLKHPPPQILVKNTPVPADPPTTFSQAKLASFITQYSTGQVSVEIEWELQKENSKRWNPEIQYTSNYYKSTNVDFAVNTEGTYSEPRPIGTRYLTRNL

SEQ ID NO: 81 - DNA, 3123 bp, Artificial Sequence
  Description of Artificial Sequence: Synthetic polynucleotide
gaattcgcccttggctgcgtcaactggaccaatgagaactttcccttcaacgattgcgtcgacaagatggtgatctggtgggaggagggcaagatgacggccaaggtcgtggagtccgccaaggccattctcggcggcagcaaggtgcgcgtggaccaaaagtgcaagtcgtccgcccagatcgaccccacccccgtgatcgtcacctccaacaccaacatgtgcgccgtgattgacgggaacagcaccaccttcgagcaccagcagccgttgcaggaccggatgttcaagttcgaactcacccgccgtctggagcacgactttggcaaggtgaccaagcaggaagtcaaagagttcttccgctgggcgcaggatcacgtgaccgaggtggcgcatgagttctacgtcagaaagggcggagccagcaaaagacccgcccccgatgacgcggatataagcgagcccaagcgggcctgcccctcagtcgcggatccatcgacgtcagacgcggaaggagctccggtggactttgccgacaggtaccaaaacaaatgttctcgtcacgcgggcatgctccagatgctgtttccctgcaaaacgtgcgagagaatgaatcagaatttcaacatttgcttcacgcacggggtcagagactgctcagaatgtttccccggtgcatcagaatctcaaccggtcgtcagaaaaaaaacgtatcagaaactgtgtgccattcatcatctgctggggcgggcacccgagattgcttgctcggcctgcgatctggtcaacgtggacctggacgactgtgtttctgagcaataaatgacttaaaccaggtatggctgccgatggttatcttccagattggcttgaggacaacctctctgagggcattcgcgagtggtgggacctgaaacctggagccccgaaacccaaagccaaccagcaaaagcaggacgacggccggggtctggtgcttcctggctacaagtacctcggacccttcaacggactcgacaagggggagcccgtcaacgcggcggacgcagcggccctcgagcacgacaaggcctacgaccagcagctcaaagcgggtgacaatccgtacctgcggtataaccacgccgacgccgagtttcaggagcgtctgcaagaagatacgtcttttgggggcaacctcgggcgagcagtcttccaggccaagaagcgggttctcgaacctctcggtctggttgaggaaggcgctaagacggctcctggaaagaagagaccggtagagccatcacctcagcgttcccccgactcctccacgggcatcggcaagaaaggccaccagcccgcgagaaagagactgaactttgggcagactggcgactcggagtcagtccccgaccctcaaccaatcggagaaccaccagcaggcccctctggtctgggatctggtacaatggctgcaggcggtggcgctccaatggcagacaataacgaaggcgccgacggagtgggtagttcctcaggaaattggcattgcgattccacatggctgggcgacagagtcatcaccaccagcacccgaacctgggccctgcccacctacaacaaccatctctacaagcaaatctccaacgggacatcgggaggaagcactaacgacaacacctactttggctacagcaccccctgggggtattttgacttcaacagattccactgccacttctcaccacgtgactggcagcgactcatcaacaataactggggattccggcccaagagactcaacttcaagctcttcaacatccaggtcaaggaggtcacgcagaatgaaggcaccaagaccatcgccaataaccttaccagcacgattcaggtgtttacggactcggaataccagctcccgtacgtcctcggctctgcgcaccagggctgcctccctccgttcccggcggacgtcttcatgattcctcagtacgggtatctgaccctaaacaatggcagtcaggctgtgggccgttcctccttctactgcctggaatacttcccttctcaaatgctgaggacgggcaacaactttgaattcagctacaccttcgaggacgtgcctttccacagcagctacgcgcacagccagagcctggaccggctgatgaaccctctcatcgaccagtacctgtattacttatccagaactcagtccacaggaggaactcaaggtactcagcaattgttattttctcaagccgggcccgcaaacatgtcggctcaggccaagaactggctacctggaccgtgttaccgtcagcaacgagtttccacgacactgtcgcaaaacaacaacagcaattttgcttggaccggtgccaccaagtatcacctgaatggcagagactccctggttaatcccggcgttgccatggctacccacaaggacgacgaggagcgcttcttcccgtcaagcggagttctaatgtttggcaagcagggggctggaaaagacaatgtggactacagcagcgtgatgctcaccagcgaagaagaaattaaaactactaacccagtggctacagagcagtatggtgtggtggcagacaacctgcagcagaccaacggagctcccattgtgggaactgtcaacagccagggggccttacctggtatggtctggcaaaaccgggacgtgtacctgcagggccccatctgggccaaaattcctcacacggacggcaactttcatccttcgccgctgatgggaggctttggactgaaacacccgcctcctcagatcctggtgaaaaacactcctgttcctgcggatcctccgaccaccttcagccaggccaagctggcttcttttatcacgcagtacagcaccggacaggtcagcgtggaaatcgaatgggagctgcagaaagaaaacagcaagcgctggaacccagagattcagtatacttccaactactacaaatctacaaatgtggactttgctgtcaatactgagggtacttattcagagcctcgccccattggcactcgttatctcacccgtaatctgtaattgcttgttaatcaataaaccggttaattcgtttcagttgaactttggtctctgcgaagggcgaattc

SEQ ID NO: 82 - protein, 738 aa, Artificial Sequence
  Description of Artificial Sequence: Synthetic polypeptide
MAADGYLPDWLEDNLSEGIREWWDLKPGAPKPKANQQKQDDGRGLVLPGYKYLGPFNGLDKGEPVNAADAAALEHDKAYDQQLKAGDNPYLRYNHADAEFQERLQEDTSFGGNLGRAVFQAKKRVLEPLGLVEEGAKTAPGKKRPVEPSPQRSPDSSTGIGKKGHQPARKRLNFGQTGDSESVPDPQPIGEPPAGPSGLGSGTMAAGGGAPMADNNEGADGVGSSSGNWHCDSTWLGDRVITTSTRTWALPTYNNHLYKQISNGTSGGSTNDNTYFGYSTPWGYFDFNRFHCHFSPRDWQRLINNNWGFRPKRLNFKLFNIQVKEVTQNEGTKTIANNLTSTIQVFTDSEYQLPYVLGSAHQGCLPPFPADVFMIPQYGYLTLNNGSQAVGRSSFYCLEYFPSQMLRTGNNFEFSYTFEDVPFHSSYAHSQSLDRLMNPLIDQYLYYLSRTQSTGGTQGTQQLLFSQAGPANMSAQAKNWLPGPCYRQQRVSTTLSQNNNSNFAWTGATKYHLNGRDSLVNPGVAMATHKDDEERFFPSSGVLMFGKQGAGKDNVDYSSVMLTSEEEIKTTNPVATEQYGVVADNLQQTNGAPIVGTVNSQGALPGMVWQNRDVYLQGPIWAKIPHTDGNFHPSPLMGGFGLKHPPPQILVKNTPVPADPPTTFSQAKLASFITQYSTGQVSVEIEWELQKENSKRWNPEIQYTSNYYKSTNVDFAVNTEGTYSEPRPIGTRYLTRNL

SEQ ID NO: 83 - DNA, 3122 bp, Artificial Sequence
  Description of Artificial Sequence: Synthetic polynucleotide
gaattcgccctttctacggctgcgtcaactggaccaatgagaactttcccttcaacgattgcgtcgacaagatggtgatctggtgggaggagggcaagatgacggccaaggtcgtggagtccgccaaggccattctcggcggcagcaaggtgcgtgtggaccaaaagtgcaagtcttccgcccagatcgatcccacccccgtgatcgtcacctccaacaccaacatgtgcgccgtgattgacgggaacagcgccaccttcgagcaccagcagccgttgcaggaccggatgttcaaatttgaactcacccgccgtctggagcatgactttggcaaggtgacgaagcaggaagtcaaagagttcttccgctgggcgcaggatcacgtgaccgaggtggcgcatgagttccacgtcagaaagggtggagccaacaagagacccgcccccgatgacgcggatataagcgagcccaagcgggcctgcccctcagtcgcggatccatcgacgtcagacgcggaaggagctccggtggactttgccgacaggtaccaaaacaaatgttctcgtcacgcgggcatgcttcagatgctgtttccctgcaagacatgcgagagaatgaatcagaatttcaacatttgcttcacgcacgggaccagagactgttcagaatgtttccccggcgtgtcagaatctcaaccggtcgtcagaaagaggacgtatcggaaactctgtgcgattcatcatctgctggggcgggctcccgagattgcttgctcggcctgcgatctggtcaacgtggacctggatgactgtgtttctgagcaataaatgacttaaaccaggtatggctgccgatggttatcttccagattggctcgaggacaacctctctgagggcattcgcgagtggtgggacttgaaacctggagccccgaaacccaaagccaaccagcaaaagcaggacgacggccggggtctggtgcttcctggctacaagtacctcggacccttcaacggactcgacaagggggagcccgtcaacgcggcggacgcagcggccctcgagcacgacaaagcctacgaccagcagctcaaagcgggtgacaatccgtacctgcggtataatcacgccgacgccgagtttcaggagcgtctgcaagaagatacgtcttttgggggcaacctcgggcgagcagtcttccaggccaagaagcgggttctcgaacctctcggtctggttgaggaaggcgctaagacggctcctggaaagaagagactggtagagcagtcgccacaagagccagactcctcctcgggcatcggcaagacaggccagcagcccgctaaaaagagactcaattttggtcagactggcgactcagagtcagtccccgacccacaacctctcggagaacctccagcagccccctcaggtctgggacctaatacaatggcttcaggcggtggcgctccaatggcagacaataacgaaggcgccgacggagtgggtaattcctcgggaaattggcattgcgattccacatggctgggggacagagtcatcaccaccagcacccgaacctgggccctgcccacctacaacaaccacctctacaagcaaatctccaacggcacctcgggaggaagcaccaacgacaacacctattttggctacagcaccccctgggggtattttgacttcaacagattccactgtcacttttcaccacgtgactggcaacgactcatcaacaacaattggggattccggcccaaaagactcaacttcaagctgttcaacatccaggtcaaggaagtcacgacgaacgaaggcaccaagaccatcgccaataatctcaccagcaccgtgcaggtctttacggactcggagtaccagttaccgtacgtgctaggatccgctcaccagggatgtctgcctccgttcccggcggacgtcttcacggttcctcagtacggctatttaactttaaacaatggaagccaagccctgggacgttcctccttctactgtctggagtatttcccatcgcagatgctgagaaccggcaacaactttcagttcagctacaccttcgaggacgtgcctttccacagcagctacgcgcacagccagagcctggacaggctgatgaatcccctcatcgaccagtacctgtactacctggtcagaacgcaaacgactggaactggagggacgcagactctggcattcagccaagcgggtcctagctcaatggccaaccaggctagaaattgggtgcccggaccttgctaccggcagcagcgcgtctccacgacaaccaaccagaacaacaacagcaactttgcctggacgggagctgccaagtttaagctgaacggccgagactctctaatgaatccgggcgtggcaatggcttcccacaaggatgacgacgaccgcttcttcccttcgagcggggtcctgatttttggcaagcaaggagccgggaacgatggagtggattacagccaagtgctgattacagatgaggaagaaatcaaggctaccaaccccgtggccacagaagaatatggagcagtggccatcaacaaccaggccgccaatacgcaggcgcagaccggactcgtgcacaaccagggggtgattcccggcatggtgtggcagaatagagacgtgtacctgcagggtcccatctgggccaaaattcctcacacggacggcaactttcacccgtctcccctgatgggcggctttggactgaagcacccgcctcctcaaattctcatcaagaacacaccggttccagcggacccgccgcttaccttcaaccaggccaagctgaactctttcatcacgcagtacagcaccggacaggtcagcgtggaaatcgagtgggagctgcagaaagaaaacagcaaacgctggaatccagagattcaatacacttccaactactacaaatctacaaatgtggactttgctgtcaacacggaaggagtttatagcgagcctcgccccattggcacccgttacctcacccgcaacctgtaattacatgttaatcaataaaccggttaattcgtttcagttgaactttggtctctgcgaagggcgaattc

SEQ ID NO: 84 - protein, 736 aa, Artificial Sequence
  Description of Artificial Sequence: Synthetic polypeptide
MAADGYLPDWLEDNLSEGIREWWDLKPGAPKPKANQQKQDDGRGLVLPGYKYLGPFNGLDKGEPVNAADAAALEHDKAYDQQLKAGDNPYLRYNHADAEFQERLQEDTSFGGNLGRAVFQAKKRVLEPLGLVEEGAKTAPGKKRLVEQSPQEPDSSSGIGKTGQQPAKKRLNFGQTGDSESVPDPQPLGEPPAAPSGLGPNTMASGGGAPMADNNEGADGVGNSSGNWHCDSTWLGDRVITTSTRTWALPTYNNHLYKQISNGTSGGSTNDNTYFGYSTPWGYFDFNRFHCHFSPRDWQRLINNNWGFRPKRLNFKLFNIQVKEVTTNEGTKTIANNLTSTVQVFTDSEYQLPYVLGSAHQGCLPPFPADVFTVPQYGYLTLNNGSQALGRSSFYCLEYFPSQMLRTGNNFQFSYTFEDVPFHSSYAHSQSLDRLMNPLIDQYLYYLVRTQTTGTGGTQTLAFSQAGPSSMANQARNWVPGPCYRQQRVSTTTNQNNNSNFAWTGAAKFKLNGRDSLMNPGVAMASHKDDDDRFFPSSGVLIFGKQGAGNDGVDYSQVLITDEEEIKATNPVATEEYGAVAINNQAANTQAQTGLVHNQGVIPGMVWQNRDVYLQGPIWAKIPHTDGNFHPSPLMGGFGLKHPPPQILIKNTPVPADPPLTFNQAKLNSFITQYSTGQVSVEIEWELQKENSKRWNPEIQYTSNYYKSTNVDFAVNTEGVYSEPRPIGTRYLTRNL

SEQ ID NO: 85 - DNA, 3117 bp, Artificial Sequence
  Description of Artificial Sequence: Synthetic polynucleotide
gaattcgcccttggctgcgtcaactggaccaatgagaactttcccttcaacgattgcgtcgacaagatggtgatctggtgggaggagggcaagatgacggccaaggtcgtggagtccgccaaggccattctcggcggcagcaaggtgcgtgtggaccaaaagtgcaagtcttccgcccagatcgatcccacccccgtgatcgtcacctccaacaccaacatgtgcgccgtgattgacgggaacagcaccaccttcgagcaccagcagccgttgcaggaccggatgttcaaatttgaactcacccgccgtctggagcatgactttggcaaggtgacgaagcaggaagtcaaagagttcttccgctgggcgcaggatcacgtgaccgaggtggcgcatgagttccacgtcagaaagggtggagccaacaagagacccgcccccgatgacgcggatataagcgagcccaagcgggcctgcccctcagtcgcggatccatcgacgtcagacgcggaaggagctccggtggactttgccgacaggtaccaaaacaaatgttctcgtcacgcgggcatgcttcagatgctgtttccctgcaagacatgcgagagaatgaatcagaatttcaacatttgcttcacgcacgggaccagagactgttcagaatgtttccccggcgtgtcagaatctcaaccggtcgtcagaaagaggacgtatcggaaactctgtgcgattcatcatctgctggggcgggctcccgagattgcttgctcggcctgcgatctggtcaacgtggacctggatgactgtgtttctgagcaataaatgacttaaaccaggtatggctgccgatggttatcttccagattggctcgaggacaacctctctgagggcattcgcgagtggtgggacttgaaacctggagccccgaaacccaaagccaaccagcaaaagcaggacgacggccggggtctggtgcttcctggctacaagtacctcggacccttcaacggactcgacaagggggagcccgtcaacgcggcggacgcagcggccctcgagcacgacaaagcctacgaccagcagctcaaagcgggtgacaatccgtacctgcggtataatcacgccgacgccgagtttcaggagcgtctgcaagaagatacgtcttttgggggcaacctcgggcgagcagtcttccaggccaagaagcgggttctcgaacctctcggtctggttgaggaaggcgctaagacggctcctggaaagaagagaccggtagagcagtcgccacaagagccagactcctcctcgggcatcggcaagacaggccagcagcccgctaaaaagagactcaattttggtcagactggcgactcagagtcagtccccgacccacaacctctcggagaacctccagcagccccctcaggtctgggacctaatacaatggcttcaggcggtggcgctccaatggcagacaataacgaaggcgccgacggagtgggtaattcctcgggaaattggcattgcgattccacatggctgggggacagagtcatcaccaccagcacccgaacctgggccctgcccacctacaacaaccacctctacaagcaaatctccaacggcacctcgggaggaagcaccaacgacaacacctattttggctacagcaccccctgggggtattttgacttcaacagattccactgtcacttttcaccacgtgactggcaacgactcatcaacaacaattggggattccggcccaaaagactcaacttcaagctgttcaacatccaggtcaaggaagtcacgacgaacgaaggcaccaagaccatcgccaataatctcaccagcaccgtgcgggtctttacggactcggagtaccagttaccgtacgtgctaggatccgctcaccagggatgtctgcctccgttcccggcggacgtcttcatggttcctcagtacggctatttaactttaaacaatggaagccaagccctgggacgttcctccttctactgtctggagtatttcccatcgcagatgctgagaaccggcaacaactttcagttcagctacaccttcgaggacgtgcctttccacagcagctacgcgcacagccagagcctggacaggctgatgaatcccctcatcgaccagtacctgtactacctggtcagaacgcaaacgactggaactggagggacgcagactctggcattcagccaagcgggtcctagctcaatggccaaccaggctagaaattgggtgcccggaccttgctaccggcagcagcgcgtctccacgacaaccaaccagagcaacaacagcaactttgcctggacgggagctgccaagtttaagctgaacggccgagactctctaatgaatccgggcgtggcaatggcttcccacaaggatgacgacgaccgcttcttcccttcgagcggggtcctgatttttggcaagcaaggagccgggaacgatggagtggattacagccaagtgctgattacagatgaggaagaaatcaaggctaccaaccccgtggccacagaagaatatggagcagtggccatcaacaaccaggccgccaatacgcaggcgcagaccggactcgtgcacaaccagggggtgattcccggcatggtgtggcagaatagagacgtgtacctgcagggtcccatctgggccaaaattcctcacacggacggcaactttcacccgtctcccctgatgggcggctttggactgaagcacccgcctcctcaaattctcatcaagaacacaccggttccagcggacccgccgcttaccttcaaccaggccaagctgaactctttcatcacgcagtacagcaccggacaggtcagcgtggaaatcgagtgggagctgcagaaagaaaacagcaaacgctggaatccagagattcaatacacttccaactactacaaatctacaaatgtggactttgctgtcaacacggaaggagtttatagcgagcctcgccccattggcacccgttacctcacccgcaacctgtaattacatgttaatcaataaaccggttaattcgtttcagttgaactttggtctctgcgaagggcgaattc

SEQ ID NO: 86 - protein, 736 aa, Artificial Sequence
  Description of Artificial Sequence: Synthetic polypeptide
MAADGYLPDWLEDNLSEGIREWWDLKPGAPKPKANQQKQDDGRGLVLPGYKYLGPFNGLDKGEPVNAADAAALEHDKAYDQQLKAGDNPYLRYNHADAEFQERLQEDTSFGGNLGRAVFQAKKRVLEPLGLVEEGAKTAPGKKRPVEQSPQEPDSSSGIGKTGQQPAKKRLNFGQTGDSESVPDPQPLGEPPAAPSGLGPNTMASGGGAPMADNNEGADGVGNSSGNWHCDSTWLGDRVITTSTRTWALPTYNNHLYKQISNGTSGGSTNDNTYFGYSTPWGYFDFNRFHCHFSPRDWQRLINNNWGFRPKRLNFKLFNIQVKEVTTNEGTKTIANNLTSTVRVFTDSEYQLPYVLGSAHQGCLPPFPADVFMVPQYGYLTLNNGSQALGRSSFYCLEYFPSQMLRTGNNFQFSYTFEDVPFHSSYAHSQSLDRLMNPLIDQYLYYLVRTQTTGTGGTQTLAFSQAGPSSMANQARNWVPGPCYRQQRVSTTTNQSNNSNFAWTGAAKFKLNGRDSLMNPGVAMASHKDDDDRFFPSSGVLIFGKQGAGNDGVDYSQVLITDEEEIKATNPVATEEYGAVAINNQAANTQAQTGLVHNQGVIPGMVWQNRDVYLQGPIWAKIPHTDGNFHPSPLMGGFGLKHPPPQILIKNTPVPADPPLTFNQAKLNSFITQYSTGQVSVEIEWELQKENSKRWNPEIQYTSNYYKSTNVDFAVNTEGVYSEPRPIGTRYLTRNL

SEQ ID NO: 87 - DNA, 3121 bp, Artificial Sequence
  Description of Artificial Sequence: Synthetic polynucleotide
gaattcgcccttctacggctgcgtcaactggaccaatgagaactttcccttcaacgattgcgtcgacaagatggtgatctggtgggaggagggcaagatgacggccaaggtcgtggagtccgccaaggccattctcggcggcagcaaggtgcgtgtggaccaaaagtgcaagtcttccgcccagatcgatcccacccccgtgatcgtcacctccaacaccaacatgtgcgccgtgattgacgggaacagcaccaccttcgagcaccagcagccgttgcaggaccggatgttcaaatttgaactcacccgccgtctggagcatgactttggcaaggtgacgaagcaggaagtcaaagagttcttccgctgggcgcaggatcacgtgaccgaggtggcgcatgagttccacgtcagaaagggtggcgccaacaagagacccgcccccgatgacgcggatataagcgagcccaagcgggcctgcccctcagtcgcggatccatcgacgtcagacgcggaaggagctccggtggactttgccgacaggtaccaaaacaaatgttctcgtcacgcgggcatgcttcagatgctgtttccctgcaagacatgcgagagaatgaatcagaatttcaacatttgcttcacgcacgggaccagagactgttcagaatgtttccccggcgtgtcagaatctcaaccggtcgtcagaaagaggacgtatcggaaactctgtgcgattcatcatctgctggggcgggctcccgagattgcttgctcggcctgcgatctggtcaacgtggacctggatgactgtgtttctgagcaataaatgacttaaaccaggtatggctgccgatggttatcttccagattggctcgaggacaacctctctgagggcattcgcgagtggtgggacttgaaacctggagccccgaaacccaaagccaaccagcaaaagcaggacgacggccggggtctggtgcttcctggctacaagtacctcggacccttcaacggactcgacaagggggagcccgtcaacgcggcggacgcagcggccctcgagcacgacaaagcctacgaccagcagctcaaagcgggtgacaatccgtacctgcggtataatcacgccgacgccgagtttcaggagcgtctgcaagaagatacgtcctttgggggcaacctcgggcgagcagtcttccaggccaagaagcgggttctcgaacctctcggtctggttgaggaaggcgctaagacggctcctggaaagaagagaccggtagagcagtcgccacaagagccagactcctcctcgggcatcggcaagacaggccagcagcccgctaaaaagagactcaattttggtcagactggcgactcagagtcagtccccgacccacaacctctcggagaacctccagcagccccctcaggtctgggacctaatacaatggcttcaggcggtggcgctccaatggcagacaataacgaaggcgccgacggagtgggtaattcctcgggaaattggcattgcgattccacatggctgggggacagagtcatcaccaccagcacccgaacctgggccctgcccacctacaacaaccacctctacaagcaaatctccaacggcacctcgggaggaagcaccaacgacaacacctattttggctacagcaccccctgggggtattttgacttcaacagattccactgtcacttttcaccacgtgactggcaacgactcatcaacaacaattggggattccggcccaaaagactcaacttcaagctgttcaacatccaggtcaaggaagtcacgacgaacgaaggcaccaagaccatcgccaataatctcaccagcaccgtgcaggtctttacggacttggagtaccagttaccgtacgtgctaggatccgctcaccagggatgtctgcctccgttcccggcggacgtcttcatggttcctcagtacggctatttaactttaaacaatggaagccaagccctgggacgttcctccttctactgtctggagtatttcccatcgcagatgccgagaaccggcaacaactttcagttcagctacaccttcgaggacgtgcctttccacagcagctacgcgcacagccagagcctggacaggctgatgaatcccctcatcgaccagtacctgtactacctggtcagaacgcaaacgactggaactggagggacgcagactctggcattcagccaagcgggtcctagctcaatggccaaccaggctagaaattgggtgcccggaccttgctaccggcagcagcgcgtctccacgacaaccaaccagaacaacaacagcaactttgcctggacgggagctgccaagtttaagctgaacggccgagactctctaatgaatccgggcgtggcaatggcttcccacaaggatgacgacgaccgcttcttcccttcgagcggggtcctgatttttggcaagcaaggagccgggaacgatggagtggattacagccaagtgctgattacagatgaggaagaaatcaaggctaccaaccccgtggccacagaagaatatggagcagtggccatcaacaaccaggccgccaatacgcaggcgcagaccggactcgtgcacaaccagggggtgattcccggcatggtgtggcagaatagagacgtgtacctgcagggtcccatctgggccaaaattcctcacacggacggcaactttcacccgtctcccctgatgggcggctttggactgaagcacccgcctcctcaaattctcatcaagaacacaccggttccagcggacccgccgcttaccttcaaccaggccaagctgaactctttcatcacgcagtacagcaccggacaggtcagcgtggaaatcgagtgggagctgcagaaagaaaacagcaaacgctggaatccagagattcaatacacttccaactactacaaatctacaaatgtggactttgctgtcaacacggaaggagtttatagcgagcctcgccccattggcacccgttacctcacccgcaacctgtaattacatgttaatcaataaaccggttaattcgtttcagttgaactttggtctctgcgaagggcgaattc

SEQ ID NO: 88 - protein, 736 aa, Artificial Sequence
  Description of Artificial Sequence: Synthetic polypeptide
MAADGYLPDWLEDNLSEGIREWWDLKPGAPKPKANQQKQDDGRGLVLPGYKYLGPFNGLDKGEPVNAADAAALEHDKAYDQQLKAGDNPYLRYNHADAEFQERLQEDTSFGGNLGRAVFQAKKRVLEPLGLVEEGAKTAPGKKRPVEQSPQEPDSSSGIGKTGQQPAKKRLNFGQTGDSESVPDPQPLGEPPAAPSGLGPNTMASGGGAPMADNNEGADGVGNSSGNWHCDSTWLGDRVITTSTRTWALPTYNNHLYKQISNGTSGGSTNDNTYFGYSTPWGYFDFNRFHCHFSPRDWQRLINNNWGFRPKRLNFKLFNIQVKEVTTNEGTKTIANNLTSTVQVFTDLEYQLPYVLGSAHQGCLPPFPADVFMVPQYGYLTLNNGSQALGRSSFYCLEYFPSQMPRTGNNFQFSYTFEDVPFHSSYAHSQSLDRLMNPLIDQYLYYLVRTQTTGTGGTQTLAFSQAGPSSMANQARNWVPGPCYRQQRVSTTTNQNNNSNFAWTGAAKFKLNGRDSLMNPGVAMASHKDDDDRFFPSSGVLIFGKQGAGNDGVDYSQVLITDEEEIKATNPVATEEYGAVAINNQAANTQAQTGLVHNQGVIPGMVWQNRDVYLQGPIWAKIPHTDGNFHPSPLMGGFGLKHPPPQILIKNTPVPADPPLTFNQAKLNSFITQYSTGQVSVEIEWELQKENSKRWNPEIQYTSNYYKSTNVDFAVNTEGVYSEPRPIGTRYLTRNL

SEQ ID NO: 89 - DNA, 3122 bp, Artificial Sequence
  Description of Artificial Sequence: Synthetic polynucleotide
gaattcgccctttctacggctgcgtcaactggaccaatgagaactttcccttcaacgattgcgtcgacaagatggtgatctggtgggaggagggcaagatgacggccaaggtcgtggagtccgccaaggccattctcggcggcagcaaggtgcgtgtggaccaaaagtgcaagtcttccgcccagatcgatcccacccccgtgatcgtcacctccaacaccaacatgtgcgccgtgattgacgggaacagcaccaccttcgagcaccagcagccgttgcaggaccggatgttcaaatttgaactcacccgccgtctggagcatgactttggcaaggtgacgaagcaggaagtcaaagggttcttccgctgggcgcaggatcacgtgaccgaggtggcgcatgagttccacgtgcgagcccaagcgggcctgcccctcagtcgcggatccatcgacgtcagaccagaaagggtggagccaacaagagacccgcccccgatgacgcggatataagcggaaggagctccggtggactttgccgacaggtaccaaaacaaatgttctcgtcacgcgggcatgcttcagatgctgtttccctgcaagacatgcgagagaatgaatcagaatttcaacatttgcttcacgcacgggaccagagactgttcagaatgtttccccggcgtgtcagaatctcaaccggtcgtcagaaagaggacgtatcggaaactctgtgcgattcatcatctgctggggcgggctcccgagattgcttgctcggcctgcgatctggtcaacgtggacctggatgactgtgtttctgagcaataaatgacttaaaccaggtatggctgccgatggttatcttccagattggctcgaggacaacctctctgagggcattcgcgagtggtgggacttgaaacctggagccccgaaacccaaagccaaccagcaaaagcaggacgacggccggggtctggtgcttcctggctacaagtacctcggacccttcaacggactcgacaagggggagcccgtcaacgcggcggacgcagcggccctcgagcacgacaaagcctacgaccagcagctcaaagcgggtgacaatccgtacctgcggtataatcacgccgacgccgagtttcaggagcgtctgcaagaagatacgtcttttgggggcaacctcgggcgagcagtcttccaggccaagaagcgggttctcgaacctctcggtctggttgaggaaggcgctaagacggctcctggaaagaagagaccggtagagcagtcgccacaagagccagactcctcctcgggcatcggcaagacaggccagcagcccgctaaaaagagactcaattttggtcagactggcgactcagagtcagtccccgacccacaacctctcggagaacctccagcagccccctcaggtctgggacctaatacaatggcttcaggcggtggcgctccaatggcagacaataacgaaggcgccgacggagtgggtaattcctcgggaaattggcattgcgattccacatggctgggggacagagtcatcaccaccagcacccgaacctgggccctgcccacctacaacaaccacctctacaagcaaatctccaacggcacctcgggaggaagcaccaacgacaacacctattttggctacagcaccccctgggggtattttgacttcaacagattccactgtcacttttcaccacgtgactggcaacgactcatcaacaacaattggggattccggcccaaaagactcaacttcaagctgttcaacatccaggtcaaggaagtcacgacgaacgaaggcaccaagaccatcgccaataatctcaccagcaccgtgcaggtctttacggactcggagtaccagttaccgtacgtgctaggatccgctcaccagggatgtctgcctccgttcccggcggacgtcttcatggttcctcagtacggctatttaactttaaacaatggaagccaagccctgggacgttcctccttctactgtctggagtatttcccatcgcagatgctgagaaccggcaacaactttcagttcagctacaccttcgaggacgtgcctttccacagcagctacgcgcacagccagagcctggacaggctgatgaatcccctcatcgaccagtacctgtactacctggtcagaacgcaaacgactggaactggagggacgcagactctggcattcagccaagcgggtcctagctcaatggccaaccaggctagaaattgggtgcccggaccttgctaccggcagcagcgcgtctccacgacaaccaaccagaacaacaacagcaactttgcctggacgggagctgccaagtttaagctgaacggccgagactctctaatgaatccgggcgtggcaatggcttcccacaaggatgacgacgaccgcttcttcccttcgagcggggtcctgatttttggcaagcaaggagccgggaacgatggagtggattacagccaagtgctgattacagatgaggaagaaatcaaggctaccaaccccgtggccacagaagaatatggagcagtggccatcaacaaccaggccgccaatacgcaggcgcagaccggactcgtgcacaaccagggggtgattcccggcatggtgtggcagaatagagacgtgtacctgcagggtcccatctgggccaaaattcctcacacggacggcaactttcacccgtctcccctgatgggcggctttggactgaagcacccgcctcctcaaattctcatcaagaacacaccggttccagcggacccgccgcttaccttcaaccaggccaagctgaactctttcatcacgcagtacagcaccggacaggtcagcgtggaaatcgagtgggagctgcagaaagaaaacagcaaacgctggaatccagagattcaatacacttccaactactacaaatctacaaatgtggactttgctgtcaacacggagggggtttatagcgagcctcgccccattggcacccgttacctcacccgcaacctgtaattacatgttaatcaataaaccggttaattcgtttcagttgaactttggtctctgcgaagggcgaattc

SEQ ID NO: 90 - protein, 736 aa, Artificial Sequence
  Description of Artificial Sequence: Synthetic polypeptide
MAADGYLPDWLEDNLSEGIREWWDLKPGAPKPKANQQKQDDGRGLVLPGYKYLGPFNGLDKGEPVNAADAAALEHDKAYDQQLKAGDNPYLRYNHADAEFQERLQEDTSFGGNLGRAVFQAKKRVLEPLGLVEEGAKTAPGKKRPVEQSPQEPDSSSGIGKTGQQPAKKRLNFGQTGDSESVPDPQPLGEPPAAPSGLGPNTMASGGGAPMADNNEGADGVGNSSGNWHCDSTWLGDRVITTSTRTWALPTYNNHLYKQISNGTSGGSTNDNTYFGYSTPWGYFDFNRFHCHFSPRDWQRLINNNWGFRPKRLNFKLFNIQVKEVTTNEGTKTIANNLTSTVQVFTDSEYQLPYVLGSAHQGCLPPFPADVFMVPQYGYLTLNNGSQALGRSSFYCLEYFPSQMLRTGNNFQFSYTFEDVPFHSSYAHSQSLDRLMNPLIDQYLYYLVRTQTTGTGGTQTLAFSQAGPSSMANQARNWVPGPCYRQQRVSTTTNQNNNSNFAWTGAAKFKLNGRDSLMNPGVAMASHKDDDDRFFPSSGVLIFGKQGAGNDGVDYSQVLITDEEEIKATNPVATEEYGAVAINNQAANTQAQTGLVHNQGVIPGMVWQNRDVYLQGPIWAKIPHTDGNFHPSPLMGGFGLKHPPPQILIKNTPVPADPPLTFNQAKLNSFITQYSTGQVSVEIEWELQKENSKRWNPEIQYTSNYYKSTNVDFAVNTEGVYSEPRPIGTRYLTRNL

SEQ ID NO: 91 - DNA, 2370 bp, Artificial Sequence
  Description of Artificial Sequence: Synthetic polynucleotide
gaattcgccctttctacggctgcgtcaactggaccaatgagaactttcccttcaacgattgcgtcgacaagatggtgatctggtgggaggagggcaagatgacggccaaggtcgtggagtccgccaaggccattctcggcggcagcaaggtgcgcgtggaccaaaagtgcaagtcgtccgcccagatcgaccccacccccgtgatcgtcacctccaacaccaacatgtgcgccgtgattgacgggaacagcaccaccttcgagcaccagcagccgttgcaggaccggatgttcaagttcgaactcacccgccgtctggagcacgactttggcaaggtgaccaagcaggaagtcaaagagttcttccgctgggcgcaggatcacgtgaccgaggtggcgcatgagttctacgtcagaaagggcggagccagcaaaagacccgcccccgatgacgcggatataagcgagcccaagcgggcctgcccctcagtcgcggatccatcgacgtcagacgcggaaggagctccggtggactttgccgacaggtaccaaaacaaatgttctcgtcacgcgggcatgcttcagacgctgtttccctgcaaaacgtgcgagagaatgaatcagaatttcaacatttgcttcacgcacggggtcagagactgctcagaatgtttccccggtgcatcagaatctcaaccggtcgtcagaaaaaaaacgtatcagaaactgtgtgccattcatcatctgctggggcgggcacccgagattgcttgctcggcctgcgatctggtcaacgtggacctggacgactgtgtttctgagcaataaatgacttaaaccaggtatggctgccgatggttatcttccagattggcttgaggacaacctctctgagggcattcgcgagtggtgggacctgaaacctggagccccgaaacccaaagccaaccagcaaaagcaggacgacggccggggtctggtgcttcctggctacaagtacctcggacccttcaacggactcgacaagggggagcccgtcaacgcggcggacgcagcggccctcgagcacgacaaggcctacgaccagcagctcaaagcgggtgacaatccgtacctgcggtataaccacgccgacgccgagtttcaggagcgtctgcaagaagatacgtcttttgggggcaacctcgggcgagcagtcttccaggccaagaagcgggttctcgaacctctcggtctggttgaggaaggcgctaagacggctcctggaaagaagagaccggtagagccatcacctcagcgttcccccgactcctccacgggcatcggcaagaaaggccaccagcccgcgagaaagagactgaactttgggcagactggcgactcggagtcagtccccgaccctcaaccaatcggagaaccaccagcaggcccctctggtctgggatctggtacaatggctgcaggcggtggcgctccaatggcagacaataacgaaggcgccgacggagtgggtagttcctcaggaaattggcattgcgattccacatggctgggcgacagagtcatcaccaccagcacccgaacctgggccctgcccacctacaacaaccatctctacaagcaaatctccaacgggacatcgggaggaagcactaacgacaacacctactttggctacagcaccccctgggggtattttgacttcaacagattccactgccacttctcaccacgtgactggcagcgactcatcaacaataactggggattccggcccaagagactcaacttcaagctcttcaacatccaggtcaaggaggtcacgcagaatgaaggcaccaagaccatcgccaataaccttaccagcacgattcaggtgtttacggactcggaataccagctcccgtacgtcctcggctctgcgcaccagggctgcctccctccgttcccggcggacgtcttcatgattcctcagtacgggtatctgaccctaaacaatggcagtcaggctgtgggccgttcctccttctactgcctggaatacttcccttctcaaatgctgaggacgggcaacaactttgaattcagctacaccttcgaggacgtgcctttccacagcagctacgcgcacagccagagcctggaccggctgatgaaccctctcatcgaccagtacctgtattacttatccagaactcagtccacaggaggaactcaaggtactcagcaattgttattttctcaagccgggcccgcaaacatgtyggctcaggccaagaactggctacctggaccgtgttaccgtcagcaacgagtttccacgacactgtcgcaaaacaacaacagcaattttgctggaccggtgccacca

SEQ ID NO: 92 - protein, 738 aa, Artificial Sequence; identical to SEQ ID NO: 82
  Description of Artificial Sequence: Synthetic polypeptide

SEQ ID NO: 93 - DNA, 2205 bp, Artificial Sequence
  Description of Artificial Sequence: Synthetic polynucleotide
atgactgacggttaccttccagattggctagaggacaacctctctgaaggcgttcgagagtggtgggcgctgcaacctggagcccctaaacccaaggcaaatcaacaacatcaggacaacgctcggggtcttgtgcttccgggttacaaatacctcggacccggcaacggactcgacaagggggaacccgtcaacgcagcggacgcggcagccctcgagcacgacaaggcctacgaccagcagctcaaggccggtgacaacccctacctcaagtacaaccacgccgacgcggagttccagcagcggcttcagggcgacacatcgtttgggggcaacctcggcagagcagtcttccaggccaaaaagagggttcttgaacctcttggtctggttgagcaagcgggtgagacggctcctggaaagaagagaccgttgattgaatccccccagcagcccgactcctccacgggtatcggcaaaaaaggcaagcagccggctaaaaagaagctcgttttcgaagacgaaactggagcaggcgacggaccccctgagggatcaacttccggagccatgtctgatgacagtgagatgcgtgcagcagctggcggagctgcagtcgagggcggacaaggtgccgatggagtgggtaatgcctcgggtgattggcattgcgattccacctggtctgagggccacgtcacgaccaccagcaccagaacctgggtcttgcccacctacaacaaccacctctacaagcgactcggagagagcctgcagtccaacacctacaacggattctccaccccctggggatactttgacttcaaccgcttccactgccacttctcaccacgtgactggcagcgactcatcaacaacaactggggcatgcgacccaaagccatgcgggtcaaaatcttcaacatccaggtcaaggaggtcacgacgtcgaacggcgagacaacggtggctaataaccttaccagcacggttcagatctttgcggactcgtcgtacgaactgccgtacgtgatggatgcgggtcaagagggcagcctgcctccttttcccaacgacgtctttatggtgccccagtacggctactgtggactggtgaccggcaacacttcgcagcaacagactgacagaaatgccttctactgcctggagtactttccttcgcagatgctgcggactggcaacaactttgaaattacgtacagttttgagaaggtgcctttccactcgatgtacgcgcacagccagagcctggaccggctgatgaaccctctcatcgaccagtacctgtggggactgcaatcgaccaccaccggaaccaccctgaatgccgggactgccaccaccaactttaccaagctgcggcctaccaacttttccaactttaaaaagaactggctgcccgggccttcaatcaagcagcagggcttctcaaagactgccaatcaaaactacaagatccctgccaccgggtcagacagtctcatcaaatacgagacgcacagcactctggacggaagatggagtgccctgacccccggacctccaatggccacggctggacctgcggacagcaagttcagcaacagccagctcatctttgcggggcctaaacagaacggcaacacggccaccgtacccgggactctgatcttcacctctgaggaggagctggcagccaccaacgccaccgatacggacatgtggggcaacctacctggcggtgaccagagcaacagcaacctgccgaccgtggacagactgacagccttgggagccgtgcctggaatggtctggcaaaacagagacatttactaccagggtcccatttgggccaagattcctcataccgatggacactttcacccctcaccgctgattggtgggtttgggctgaaacacccgcctcctcaaatttttatcaagaacaccccggtacctgcgaatcctgcaacgaccttcagctctactccggtaaactccttcattactcagtacagcactggccaggtgtcggtgcagattgactgggagatccagaaggagcggtccaaacgctggaaccccgaggtccagtttacctccaactacggacagcaaaactctctgttgtgggctcccgatgcggctgggaaatacactgagcctagggctatcggtacccgctacctcacccaccacctgtaa

SEQ ID NO: 94 - protein, 734 aa, Artificial Sequence; identical to SEQ ID NO: 66
  Description of Artificial Sequence: Synthetic polypeptide

SEQ ID NO: 95 - DNA, 3128 bp, Artificial Sequence
  Description of Artificial Sequence: Synthetic polynucleotide
gaattcgccctttctacggctgcgtcaactggaccaatgagaactttcccttcaacgattgcgtcgacaagatgttgatctggtgggaggagggcaagatgacggccaaggtcgtggagtccgccaaggccattctcggcggcagcaaagtgcgcgtggaccaaaagtgcaagccgtccgcccagatcgaccccacccccgtgatcgtcacctccaacaccaacatgtgcgccgtgattgacgggaacagcaccaccttcgagcaccagcagccgttgcgggaccggatgttcaagtttgaactcacccgccgtctggagcacgactttggcaaggtgacaaagcaggaagtcagagagttcttccgctgggcgcaggatcacgtgaccgaggtggcgcacgagttctacgtcagaaagggtggagccaacaagagacccgcccccgatgacgcggataaaagcgagcccaagcgggcctgcccctcagtcgcggatccatcgacgtcagacgcggaaggagctccggtggactttgccgacaggtaccaaaacaaatgttctcgtcacgcgggcatgcttcagatgctgtttccctgcaaaacatgcgagagaatgaatcagaatttcaacatttgcttcacgcacgggaccagagactgttcagaatgtttccccggcgtgtcagaatctcaaccggtcgtcagaaaaaagacgtatcggaaactctgtgcgattcatcatctgctggggcgggcacccgagattgcttgctcggcctgcgatctggtcaacgtggacctagatgactgtgtttctgagcaataaatgacttaaaccaggtatggctgccgatggttatcttccagattggctcgaggacaacctctctgagggcattcgcgagtggtgggacttgaaacctggagccccgaaacccaaagccaaccagcaaaagcaggacgacggccggggtctggtgcttcctggctacaagtacctcggacccttcaacggactcgacaagggggagcccgtcaacgcggcggacgcagcggccctcgagcacgacaaggcctacgaccagcagctcaaagcgggtgacaatccgtacctgcggtataaccacgccgacgccgagtttcaggagcgtctgcaagaagatacgtcttttgggggcaacctcgggcgagcagtcttccaggccaagaagcgggttctcgaacctctcggtctggttgaggaaggcgctaagacggctcctggaaagaagagaccggtagagccatcaccccagcgttctccagactcctctacgggcatcggcaagaaaggccagcagcccgcgaaaaagagactcaactttgggcagactggcgactcagagtcagtgcccgaccctcaaccaatcggagaaccccccgcaggcccctctggtctgggatctggtacaatggctgcaggcggtggcgctccaatggcagacaataacgaaggcgccgacggagtgggtagttcctcaggaaattggcattgcgattccacatggctgggcgacagagtcatcaccaccagcacccgaacctgggccctccccacctacaacaaccacctctacaagcaaatctccaacgggacttcgggaggaagcaccaacgacaacacctacttcggctacagcaccccctgggggtattttgactttaacagattccactgccacttctcaccacgtgactggcagcgactcatcaacaacaactggggattccggcccaagagactcaacttcaagctcttcaacatccaggtcaaggaggtcacgcagaatgaaggcaccaagaccatcgccaataaccttaccagcacgattcaggtctttacggactcggaataccagctcccgtacgtcctcggctctgcgcaccagggctgcctgcctccgttcccggcggacgtcttcatgattcctcagtacgggtacctgactctgaacaatggcagtcaggccgtgggccgttcctccttctactgcctggagtactttccttctcaaatgctgagaacgggcaacaactttgagttcagctaccagtttgaggacgtgccttttcacagcagctacgcgcacagccaaagcctggaccggctgatgaaccccctcatcgaccagtacctgtactacctgtctcggactcagtccacgggaggtaccgcaggaactcagcagttgctattttctcaggccgggcctaataacatgtcggctcaggccaaaaactggctacccgggccctgctaccggcagcaacgcgtctccacgacactgtcgcaaaataacaacagcaactgtaaatcccggtgtcgctatggcaacccacaaggacgacgaagagcgattttgcctggaccggtgccaccaagtatcatctgaatggcagagactctctgttttccgtccagcggagtcttaatgtttgggaaacagggagctggaaaagacaacgtggactatagcagcgttatgctaaccagtgaggaagaaattaaaaccaccaacccagtggccacggaacagtacggcgtggtggccgataacctgcaacagcaaaacgccgctcctattgtaggggccgtcaacagtcaaggagccttacctggcatggtctggcagaaccgggacgtgtacctgcagggtcctatctgggccaagattcctcacacggacggaaactttcatccctcgccgctgatgggaggctttggactgaaacacccgcctcctcagatcctgattaagaatacacctgttcccgcggatcctccaactaccttcagtcaagctaagctggcgtcgttcatcacgcagtacagcaccggacaggtcagcgtggaaattgaatgggagctgcagaaagaaaacagcaaacgctggaacccagagattcaatacacttccaactactacaaatctacaaatgtggacttcgctgttaacacagatggcacttattctgagcctcgccccattggcacccgttacctcacccgtaatctgtaattgctcgttaatcaataaaccggttgattcgtttcagttgaactttggtctctgcgaagggcgaattc

SEQ ID NO: 96 - protein, 738 aa, Artificial Sequence; identical to SEQ ID NO: 16
  Description of Artificial Sequence: Synthetic polypeptide

SEQ ID NO: 97 - DNA, 3128 bp, Artificial Sequence
  Description of Artificial Sequence: Synthetic polynucleotide
gaattcgccctttctacggctgcgtcaactggaccaatgagaactttcccttcaacgattgcgtcgacaagatggtgatctggtgggaggagggcaagatgacggccaaggtcgtggagtccgccaaggccattctcggcggcagcaaagtgcgcgtggaccaaaagtgcaagtcgtccgcccagatcgaccccacccccgtgatcgtcacctccaacaccaacatgtgcgccgtgattgacgggaacagcaccaccttcgagcaccagcagccgttgcaggaccggatgttcaagtttgaactcacccgccgtctggagcacgactttggcaaggtgacaaagcaggaagtcagagagttcttccgctgggcgcaggatcacgtgaccgaggtggcgcacgagttctacgtcagaaagggtggagccaacaagagacccgcccccgatgacgcggataaaagcgagcccaagcgggcctgcccctcagtcgcggatccatcgacgtcagacgcggaaggagctccggtggactttgccgacaggtaccaaaacaaatgttctcgtcacgcgggcatgcttcagatgctgtttccctgcaaaacatgcgagagaatgaatcagaatttcaacatttgcttcacgcacgggaccagagactgttcagaatgtttccccggcgtgtcagaatctcaaccggttgtcagaaaaaagacgtatcggaaactctgtgcgattcatcatctgctggggcgggcacccgagattgcttgctcggcctgcgatctggtcaacgtggacctagatgactgtgtttctgagcaataaatgacttaaaccaggtatggctgccgatggttatcttccagattggctcgaggacaacctctctgagggcattcgcgagtggtgggacttgaaacctggagccccgaaacccaaagccaaccagcaaaagcaggacgacggccggggtctggtgcttcctggctacaagtacctcggacccttcaacggactcgacaagggggagcccgtcaacgcggcggacgcagcggccctcgagcacgacaaggcctacgaccagcagctcaaagcgggtgacaatccgtacctgcggtataaccacgccgacgccgagtttcaggagcgtctgcaagaagatacgtcttttgggggcaacctcgggcgagcagtcttccaggccaagaagcgggttctcgaacctctcggtctggttgaggaaggcgctaagacggctcctggaaagaagagaccggtagagccatcaccccagcgttctccagactcctctacgggcatcggcaagaaaggccagcagcccgcgaaaaagagactcaactttgggcagactggcgactcagagtcagtgcccgaccctcaaccaatcggagaaccccccgcaggcccctctggtctgggatctggtacaatggctgcaggcggtggcgctccaatggcagacaataacgaaggcgccgacggagtgggtagttcctcaggaaattggcattgcgattccacatggctgggcgacagagtcatcaccaccagcacccgaacctgggccctccccacctacaacaaccacctctacaagcaaatctccaacgggacttcgggaggaagcaccaacgacaacacctacttcggctacagcaccccctgggggtattttgactttaacagattccactgccacttctcaccacgtgactggcagcgactcatcaacaacaactggggattccggcccaagagacccaacttcaagctcttcaacatccaggtcaaggaggtcacgcagaatgaaggcaccaagaccatcgccaataaccttaccagcacgattcaggtctttacggactcggaataccagctcccgtacgtcctcggctctgcgcaccagggctgcctgcctccgttcccggcggacgtcttcatgattcctcagtacgggtacctgactctgaacaatggcagtcaggccgtgggccgttcctccttctactgcctggagtactttccttctcaaatgctgagaacgggcaacaactttgagttcagctaccagtttgaggacgtgccttttcacagcagctacgcgcacagccaaagcctggaccggctgatgaaccccctcatcgaccagtacctgtactacctgtctcggactcagtccacgggaggtaccgcaggaactcagcagttgctattttctcaggccgggcctaataacatgtcggctcaggccaaaaactggctacccgggccctgctaccggcagcaacgcgtctccacgacactgtcgcaaaataacaacagcaactttgcctggaccggtgccaccaagtatcatctgaatggcagagactctctggtaaatcccggtgtcgctatggcaacccacaaggacgacgaagagcgattttttccgtccagcggagtcttaatgtttgggaaacagggagctggaaaagacaacgtggactatagcagcgttatgctaaccagtgaggaagaaattaaaaccaccaacccagtggccacagaacagtacggcgtggtggccgataacctgcaacagcaaaacgccgctcctattgtaggggccgtcaacagtcaaggagccttacctggcatggtctggcagaaccgggacgtgtacctgcagggtcctatctgggccaagattcctcacacggacggaaactttcatccctcgccgctgatgggaggctttggactgaaacacccgcctcctcagatcctgattaagaatacacctgttcccgcggatcctccaactaccttcagtcaagctaagctggcgtcgttcatcacgcagtacagcaccggacaggtcagcgtggaaattgaatgggagctgcagaaagaaaacagcaaacgctggaacccagagattcaatacacttccaactactacaaatctacaaatgtggactttgctgttaacacagatggcacttattctgagcctcgccccattggcacccgttacctcacccgtaatctgtaattgcttgttaatcaataaaccggttgattcgtttcagttgaactttggtctctgcgaagggcgaattc

SEQ ID NO: 98 - protein, 738 aa, Artificial Sequence
  Description of Artificial Sequence: Synthetic polypeptide
MAADGYLPDWLEDNLSEGIREWWDLKPGAPKPKANQQKQDDGRGLVLPGYKYLGPFNGLDKGEPVNAADAAALEHDKAYDQQLKAGDNPYLRYNHADAEFQERLQEDTSFGGNLGRAVFQAKKRVLEPLGLVEEGAKTAPGKKRPVEPSPQRSPDSSTGIGKKGQQPAKKRLNFGQTGDSESVPDPQPIGEPPAGPSGLGSGTMAAGGGAPMADNNEGADGVGSSSGNWHCDSTWLGDRVITTSTRTWALPTYNNHLYKQISNGTSGGSTNDNTYFGYSTPWGYFDFNRFHCHFSPRDWQRLINNNWGFRPKRPNFKLFNIQVKEVTQNEGTKTIANNLTSTIQVFTDSEYQLPYVLGSAHQGCLPPFPADVFMIPQYGYLTLNNGSQAVGRSSFYCLEYFPSQMLRTGNNFEFSYQFEDVPFHSSYAHSQSLDRLMNPLIDQYLYYLSRTQSTGGTAGTQQLLFSQAGPNNMSAQAKNWLPGPCYRQQRVSTTLSQNNNSNFAWTGATKYHLNGRDSLVNPGVAMATHKDDEERFFPSSGVLMFGKQGAGKDNVDYSSVMLTSEEEIKTTNPVATEQYGVVADNLQQQNAAPIVGAVNSQGALPGMVWQNRDVYLQGPIWAKIPHTDGNFHPSPLMGGFGLKHPPPQILIKNTPVPADPPTTFSQAKLASFITQYSTGQVSVEIEWELQKENSKRWNPEIQYTSNYYKSTNVDFAVNTDGTYSEPRPIGTRYLTRNL

SEQ ID NO: 99 - protein, 738 aa, Artificial Sequence
  Description of Artificial Sequence: Synthetic polypeptide
MAADGYLPDWLEDNLSEGIREWWDLKPGAPKPKANQQKQDDGRGLVLPGYKYLGPFNGLDKGEPVNAADAAALEHDKAYDQQLKAGDNPYLRYNHADAEFQERLQEDTSFGGNLGRAVFQAKKRVLEPLGLVEEAAKTAPGKKRPVEPSPQRSPDSSTGIGKKGQQPAKKRLNFGQTGDSESVPDPQPIGEPPAGPSGLGSGTMAAGGGAPMADNNEGADGVGSSSGNWHCDSTWLGDRVITTSTRTWALPTYNNHLYKQISNGTSGGSTNDNTYFGYSTPWGYFDFNRFHCHFSPRDWQRLINNNWGFRPKRLSFKLFNIQVKEVTQNEGTKTIANNLTSTIQVFTDSEYQLPYVLGSAHQGCLPPFPADVFMIPQYGYLTLNNGSQAVGRSSFYCLEYFPSQMLRTGNNFEFSYTFEDVPFHSSYAHSQSLDRLMNPLIDQYLYYLSRTQSTGGTQGTQQLLFSQAGPANMSAQAKNWLPGPCYRQQRVSTTLSQNNNSNFAWTGATKYHLNGRDSLVNPGVAMATHKDDEERFFPSSGVLMFGKQGAGRDNVDYSSVMLTSEEEIKTTNPVATEQYGVVADNLQQTNTGPIVGNVNSQGALPGMVWQNRDVYLQGPIWAKIPHTDGNFHPSPLMGGFGLKHPPPQILIKNTPVPADPPTTFSQAKLASFITQYSTGQVSVEIEWELQKENSKRWNPEIQYTSNYYKSTNVDFAVNTEGTYSEPRPIGTRYLTRNL

SEQ ID NO: 100 - DNA, 2172 bp, Artificial Sequence
  Description of Artificial Sequence: Synthetic polynucleotide
atgtcttttgttgatcaccctccagattggttggaagaagttggtgaaggtcttcgcgagtttttgggccttgaagcgggcccaccgaaaccaaaacccaatcagcagcatcaagatcaagcccgtggtcttgtgctgcctggttataactatctcggacccggaaacggtctcgatcgaggagagcctgtcaacagggcagacgaggtcgcgcgagagcacgacatctcgtacaacgagcagcttgaggcgggagacaacccctacctcaagtacaaccacgcggacgccgagtttcaggagaagctcgccgacgacacatccttcgggggaaacctcggaaaggcagtctttcaggccaagaaaagggttctcgaaccttttggcctggttgaagagggtgctaagacggcccctaccggaaagcggatagacgaccactttccaaaaagaaagaaggctcggaccgaagaggactccaagccttccacctcgtcagacgccgaagctggacccagcggatcccagcagctgcaaatcccagcccaaccagcctcaagtttgggagctgatacaatgtctgcgggaggtggcggcccattgggcgacaataaccaaggtgccgatggagtgggcaatgcctcgggagattggcattgcgattccacgtggatgggggacagagtcgtcaccaagtccacccgaacctgggtgctgcccagctacaacaaccaccagtaccgagagatcaaaagcggctccgtcgacggaagcaacgccaacgcctactttggatacagcaccccctgggggtactttgactttaaccgcttccacagccactggagcccccgagactggcaaagactcatcaacaactactggggcttcagaccccggtccctcagagtcaaaatcttcaacattcaagtcaaagaggtcacggtgcaggactccaccaccaccatcgccaacaacctcacctccaccgtccaagtgtttacggacgacgactaccagctgccctacgtcgtcggcaacgggaccgagggatgcctgccggccttccctccgcaggtctttacgctgccgcagtacggttacgcgacgctgaaccgcgacaacacagaaaatcccaccgagaggagcagcttcttctgcctagagtactttcccagcaagatgctgagaacgggcaacaactttgagtttacctacaactttgaggaggtgcccttccactccagcttcgctcccagtcagaacctgttcaagctggccaacccgctggtggaccagtacttgtaccgcttcgtgagcacaaataacactggcggagtccagttcaacaagaacctggccgggagatacgccaacacctacaaaaactggttcccggggcccatgggccgaacccagggctggaacctgggctccggggtcaaccgcgccagtgtcagcgccttcgccacgaccaataggatggagctcgagggcgcgagttaccaggtgcccccgcagccgaacggcatgaccaacaacctccagggcagcaacacctatgccctggagaacactatgatcttcaacagccagccggcgaacccgggcaccaccgccacgtacctcgagggcaacatgctcatcaccagcgagagcgagacgcagccggtgaaccgcgtggcgtacaacgtcggcgggcagatggccaccaacaaccagagctccaccactgcccccgcgaccggcacgtacaacctccaggaaatcgtgcccggcagcgtgtggatggagagggacgtgtacctccaaggacccatctgggccaagatcccagagacgggggcgcactttcacccctctccggccatgggcggattcggactcaaacacccaccgcccatgatgctcatcaagaacacgcctgtgcccggaaatatcaccagcttctcggacgtgcccgtcagcagcttcatcacccagtacagcaccgggcaggtcaccgtggagatggagtgggagctcaagaaggaaaactccaagaggtggaacccagagatccagtacacaaacaactacaacgacccccagtttgtggactttgccccggacagcaccggggaatacagaaccaccagacctatcggaacccgataccttacccgacccctt

SEQ ID NO: 101 - protein, 720 aa, Artificial Sequence
  Description of Artificial Sequence: Synthetic polypeptide
MSFVDHPPDWLEEVGEGLREFLGLEAGPPKPKPNQQHQDQARGLVLPGYNYLGPGNGLDRGEPVNRADEVAREHDISYNEQLEAGDNPYLKYNHADAEFQEKLADDTSFGGNLGKAVFQAKKRVLEPFGLVEEGAKTAPTGKRIDDHFPKRKKARTEEDSKPSTSSDAEAGPSGSQQLQIPAQPASSLGADTMSAGGGGPLGDNNQGADGVGNASGDWHCDSTWMGDRVVTKSTRTWVLPSYNNHQYREIKSGSVDGSNANAYFGYSTPWGYFDFNRFHSHWSPRDWQRLINNYWGFRPRSLRVKIFNIQVKEVTVQDSTTTIANNLTSTVQVFTDDDYQLPYVVGNGTEGCLPAFPPQVFTLPQYGYATLNRDNTENPTERSSFFCLEYFPSKMLRTGNNFEFTYNFEEVPFHSSFAPSQNLFKLANPLVDQYLYRFVSTNNTGGVQFNKNLAGRYANTYKNWFPGPMGRTQGWNLGSGVNRASVSAFATTNRMELEGASYQVPPQPNGMTNNLQGSNTYALENTMIFNSQPANPGTTATYLEGNMLITSESETQPVNRVAYNVGGQMATNNQSSTTAPATGTYNLQEIVPGSVWMERDVYLQGPIWAKIPETGAHFHPSPAMGGFGLKHPPPMMLIKNTPVPGNITSFSDVPVSSFITQYSTGQVTVEMEWELKKENSKRWNPEIQYTNNYNDPQFVDFAPDSTGEYRTTRPIGTRYL

SEQ ID NO: 102 - protein, 724 aa, Adeno-associated virus 5
MSFVDHPPDWLEEVGEGLREFLGLEAGPPKPKPNQQHQDQARGLVLPGYNYLGPGNGLDRGEPVNRADEVAREHDISYNEQLEAGDNPYLKYNHADAEFQEKLADDTSFGGNLGKAVFQAKKRVLEPFGLVEEGAKTAPTGKRIDDHFPKRKKARTEEDSKPSTSSDAEAGPSGSQQLQIPAQPASSLGADTMSAGGGGPLGDNNQGADGVGNASGDWHCDSTWMGDRVVTKSTRTWVLPSYNNHQYREIKSGSVDGSNANAYFGYSTPWGYFDFNRFHSHWSPRDWQRLINNYWGFRPRSLRVKIFNIQVKEVTVQDSTTTIANNLTSTVQVFTDDDYQLPYVVGNGTEGCLPAFPPQVFTLPQYGYATLNRDNTENPTERSSFFCLEYFPSKMLRTGNNFEFTYNFEEVPFHSSFAPSQNLFKLANPLVDQYLYRFVSTNNTGGVQFNKNLAGRYANTYKNWFPGPMGRTQGWNLGSGVNRASVSAFATTNRMELEGASYQVPPQPNGMTNNLQGSNTYALENTMIFNSQPANPGTTATYLEGNMLITSESETQPVNRVAYNVGGQMATNNQSSTTAPATGTYNLQEIVPGSVWMERDVYLQGPIWAKIPETGAHFHPSPAMGGFGLKHPPPMMLIKNTPVPGNITSFSDVPVSSFITQYSTGQVTVEMEWELKKENSKRWNPEIQYTNNYNDPQFVDFAPDSTGEYRTTRPIGTRYLTRPL

SEQ ID NO: 103 - DNA, 2175 bp, Adeno-associated virus
atgtcttttgttgatcaccctccagattggttggaagaagttggtgaaggtcttcgcgagtttttgggccttgaagcgggcccaccgaaaccaaaacccaatcagcagcatcaagatcaagcccgtggtcttgtgctgcctggttataactatctcggacccggaaacggtctcgatcgaggagagcctgtcaacagggcagacgaggtcgcgcgagagcacgacatctcgtacaacgagcagcttgaggcgggagacaacccctacctcaagtacaaccacgcggacgccgagtttcaggagaagctcgccgacgacacatccttcgggggaaacctcggaaaggcagtctttcaggccaagaaaagggttctcgaaccttttggcctggttgaagagggtgctaagacggcccctaccggaaagcggatagacgaccactttccaaaaagaaagaaggctcggaccgaagaggactccaagccttccacctcgtcagacgccgaagctggacccagcggatcccagcagctgcaaatcccagcccaaccagcctcaagtttgggagctgatacaatgtctgcgggaggtggcggcccattgggcgacaataaccaaggtgccgatggagtgggcaatgcctcgggagattggcattgcgattccacgtggatgggggacagagtcgtcaccaagtccacccgaacctgggtgctgcccagctacaacaaccaccagtaccgagagatcaaaagcggctccgtcgacggaagcaacgccaacgcctactttggatacagcaccccctgggggtactttgactttaaccgcttccacagccactggagcccccgagactggcaaagactcatcaacaactactggggcttcagaccccggtccctcagagtcaaaatcttcaacattcaagtcaaagaggtcacggtgcaggactccaccaccaccatcgccaacaacctcacctccaccgtccaagtgtttacggacgacgactaccagctgccctacgtcgtcggcaacgggaccgagggatgcctgccggccttccctccgcaggtctttacgctgccgcagtacggttacgcgacgctgaaccgcgacaacacagaaaatcccaccgagaggagcagcttcttctgcctagagtactttcccagcaagatgctgagaacgggcaacaactttgagtttacctacaactttgaggaggtgcccttccactccagcttcgctcccagtcagaacctgttcaagctggccaacccgctggtggaccagtacttgtaccgcttcgtgagcacaaataacactggcggagtccagttcaacaagaacctggccgggagatacgccaacacctacaaaaactggttcccggggcccatgggccgaacccagggctggaacctgggctccggggtcaaccgcgccagtgtcagcgccttcgccacgaccaataggatggagctcgagggcgcgagttaccaggtgcccccgcagccgaacggcatgaccaacaacctccagggcagcaacacctatgccctggagaacactatgatcttcaacagccagccggcgaacccgggcaccaccgccacgtacctcgagggcaacatgctcatcaccagcgagagcgagacgcagccggtgaaccgcgtggcgtacaacgtcggcgggcagatggccaccaacaaccagagctccaccactgcccccgcgaccggcacgtacaacctccaggaaatcgtgcccggcagcgtgtggatggagagggacgtgtacctccaaggacccatctgggccaagatcccagagacgggggcgcactttcacccctctccggccatgggcggattcggactcaaacacccaccgcccatgatgctcatcaagaacacgcctgtgcccggaaatatcaccagcttctcggacgtgcccgtcagcagcttcatcacccagtacagcaccgggcaggtcaccgtggagatggagtgggagctcaagaaggaaaactccaagaggtggaacccagagatccagtacacaaacaactacaacgacccccagtttgtggactttgccccggacagcaccggggaatacagaaccaccagacctatcggaacccgataccttacccgacccctttaa

SEQ ID NO: 104 - DNA, 2208 bp, Artificial Sequence
  Description of Artificial Sequence: Synthetic polynucleotide
atggctgccgatggttatcttccagattggctcgaggacaacctctctgagggcattcgcgagtggtgggacttgaaacctggagccccgaaacccaaagccaaccagcaaaagcaggacgacggccggggtctggtgcttcctggctacaagtacctcggacccttcaacggactcgacaagggggagcccgtcaacgcggcggatgcagcggccctcgagcacgacaaggcctacgaccagcagctcaaagcgggtgacaatccgtacctgcggtataaccacgccgacgccgagtttcaggagcgtctgcaagaagatacgtcttttgggggcaacctcgggcgagcagtcttccaggccaagaagagggttctcgaaccttttggtctggttgaggaaggtgctaagacggctcctggaaagaaacgtccggtagagcagtcgccacaagagccagactcctcctcgggcattggcaagacaggccagcagcccgctaaaaagagactcaattttggtcagactggcgactcagagtcagtccccgacccacaacctctcggagaacctccagcaacccccgctgctgtgggacctactacaatggcttcaggcggtggcgcaccaatggcagacaataacgaaggcgccgacggagtgggtaatgcctcaggaaattggcattgcgattccacatggctgggcgacagagtcatcaccaccagcacccgaacatgggccttgcccacctataacaaccacctctacaagcaaatctccagtgcttcaacgggggccagcaacgacaaccactacttcggctacagcaccccctgggggtattttgatttcaacagattccactgccatttctcaccacgtgactggcagcgactcatcaacaacaattggggattccggcccaagagactcaacttcaagctcttcaacatccaagtcaaggaggtcacgacgaatgatggcgtcacgaccatcgctaataaccttaccagcacggttcaagtcttctcggactcggagtaccagttgccgtacgtcctcggctctgcgcaccagggctgcctccctccgttcccggcggacgtgttcatgattccgcagtacggctacctaacgctcaacaatggcagccaggcagtgggacggtcatccttttactgcctggaatatttcccatcgcagatgctgagaacgggcaataactttaccttcagctacaccttcgaggacgtgcctttccacagcagctacgcgcacagccagagcctggaccggctgatgaatcctctcatcgaccagtacctgtattacctgaacagaactcagaatcagtccggaagtgcccaaaacaaggacttgctgtttagccgggggtctccagctggcatgtctgttcagcccaaaaactggctacctggaccctgttaccggcagcagcgcgtttctaaaacaaaaacagacaacaacaacagcaactttacctggactggtgcttcaaaatataaccttaatgggcgtgaatctataatcaaccctggcactgctatggcctcacacaaagacgacaaagacaagttctttcccatgagcggtgtcatgatttttggaaaggagagcgccggagcttcaaacactgcattggacaatgtcatgatcacagacgaagaggaaatcaaagccactaaccccgtggccaccgaaagatttgggactgtggcagtcaatctccagagcagcagcacagaccctgcgaccggagatgtgcatgttatgggagccttacctggaatggtgtggcaagacagagacgtatacctgcagggtcctatttgggccaaaattcctcacacggatggacactttcacccgtctcctctcatgggcggctttggacttaagcacccgcctcctcagatcctcatcaaaaacacgcctgttcctgcgaatcctccggcagagttttcggctacaaagtttgcttcattcatcacccagtattccacaggacaagtgagcgtggagattgaatgggagctgcagaaagaaaacagcaaacgctggaatcccgaagtgcagtatacatctaactatgcaaaatctgccaacgttgatttcactgtggacaacaatggactttatactgagcctcgccccattggcacccgttacctcacccgtcccctg

SEQ ID NO: 105 - protein, 736 aa, Adeno-associated virus 6
MAADGYLPDWLEDNLSEGIREWWDLKPGAPKPKANQQKQDDGRGLVLPGYKYLGPFNGLDKGEPVNAADAAALEHDKAYDQQLKAGDNPYLRYNHADAEFQERLQEDTSFGGNLGRAVFQAKKRVLEPFGLVEEGAKTAPGKKRPVEQSPQEPDSSSGIGKTGQQPAKKRLNFGQTGDSESVPDPQPLGEPPATPAAVGPTTMASGGGAPMADNNEGADGVGNASGNWHCDSTWLGDRVITTSTRTWALPTYNNHLYKQISSASTGASNDNHYFGYSTPWGYFDFNRFHCHFSPRDWQRLINNNWGFRPKRLNFKLFNIQVKEVTTNDGVTTIANNLTSTVQVFSDSEYQLPYVLGSAHQGCLPPFPADVFMIPQYGYLTLNNGSQAVGRSSFYCLEYFPSQMLRTGNNFTFSYTFEDVPFHSSYAHSQSLDRLMNPLIDQYLYYLNRTQNQSGSAQNKDLLFSRGSPAGMSVQPKNWLPGPCYRQQRVSKTKTDNNNSNFTWTGASKYNLNGRESIINPGTAMASHKDDKDKFFPMSGVMIFGKESAGASNTALDNVMITDEEEIKATNPVATERFGTVAVNLQSSSTDPATGDVHVMGALPGMVWQDRDVYLQGPIWAKIPHTDGHFHPSPLMGGFGLKHPPPQILIKNTPVPANPPAEFSATKFASFITQYSTGQVSVEIEWELQKENSKRWNPEVQYTSNYAKSANVDFTVDNNGLYTEPRPIGTRYLTRPL

SEQ ID NO: 106 - protein, 623 aa, Adeno-associated virus 6
MPGFYEIVIKVPSDLDEHLPGISDSFVNWVAEKEWELPPDSDMDLNLIEQAPLTVAEKLQRDFLVQWRRVSKAPEALFFVQFEKGESYFHLHILVETTGVKSMVLGRFLSQIRDKLVQTIYRGIEPTLPNWFAVTKTRNGAGGGNKVVDECYIPNYLLPKTQPELQWAWTNMEEYISACLNLAERKRLVAHDLTHVSQTQEQNKENLNPNSDAPVIRSKTSARYMELVGWLVDRGITSEKQWIQEDQASYISFNAASNSRSQIKAALDNAGKIMALTKSAPDYLVGPAPPADIKTNRIYRILELNGYDPAYAGSVFLGWAQKRFGKRNTIWLFGPATTGKTNIAEAIAHAVPFYGCVNWTNENFPFNDCVDKMVIWWEEGKMTAKVVESAKAILGGSKVRVDQKCKSSAQIDPTPVIVTSNTNMCAVIDGNSTTFEHQQPLQDRMFKFELTRRLEHDFGKVTKQEVKEFFRWAQDHVTEVAHEFYVRKGGANKRPAPDDADKSEPKRACPSVADPSTSDAEGAPVDFADRYQNKCSRHAGMLQMLFPCKTCERMNQNFNICFTHGTRDCSECFPGVSESQPVVRKRTYRKLCAIHHLLGRAPEIACSACDLVNVDLDDCVSEQ

SEQ ID NO: 107 - DNA, 4683 bp, Adeno-associated virus 6
ttggccactccctctctgcgcgctcgctcgctcactgaggccgggcgaccaaaggtcgcccgacgcccgggctttgcccgggcggcctcagtgagcgagcgagcgcgcagagagggagtggccaactccatcactaggggttcctggaggggtggagtcgtgacgtgaattacgtcatagggttagggaggtcctgtattagaggtcacgtgagtgttttgcgacattttgcgacaccatgtggtcacgctgggtatttaagcccgagtgagcacgcagggtctccattttgaagcgggaggtttgaacgcgcagcgccatgccggggttttacgagattgtgattaaggtccccagcgaccttgacgagcatctgcccggcatttctgacagctttgtgaactgggtggccgagaaggaatgggagttgccgccagattctgacatggatctgaatctgattgagcaggcacccctgaccgtggccgagaagctgcagcgcgacttcctggtccagtggcgccgcgtgagtaaggccccggaggccctcttctttgttcagttcgagaagggcgagtcctacttccacctccatattctggtggagaccacgggggtcaaatccatggtgctgggccgcttcctgagtcagattagggacaagctggtgcagaccatctaccgcgggatcgagccgaccctgcccaactggttcgcggtgaccaagacgcgtaatggcgccggaggggggaacaaggtggtggacgagtgctacatccccaactacctcctgcccaagactcagcccgagctgcagtgggcgtggactaacatggaggagtatataagcgcgtgtttaaacctggccgagcgcaaacggctcgtggcgcacgacctgacccacgtcagccagacccaggagcagaacaaggagaatctgaaccccaattctgacgcgcctgtcatccggtcaaaaacctccgcacgctacatggagctggtcgggtggctggtggaccggggcatcacctccgagaagcagtggatccaggaggaccaggcctcgtacatctccttcaacgccgcctccaactcgcggtcccagatcaaggccgctctggacaatgccggcaagatcatggcgctgaccaaatccgcgcccgactacctggtaggccccgctccgcccgccgacattaaaaccaaccgcatttaccgcatcctggagctgaacggctacgaccctgcctacgccggctccgtctttctcggctgggcccagaaaaggttcggaaaacgcaacaccatctggctgtttgggccggccaccacgggcaagaccaacatcgcggaagccatcgcccacgccgtgcccttctacggctgcgtcaactggaccaatgagaactttcccttcaacgattgcgtcgacaagatggtgatctggtgggaggagggcaagatgacggccaaggtcgtggagtccgccaaggccattctcggcggcagcaaggtgcgcgtggaccaaaagtgcaagtcgtccgcccagatcgatcccacccccgtgatcgtcacctccaacaccaacatgtgcgccgtgattgacgggaacagcaccaccttcgagcaccagcagccgttgcaggaccggatgttcaaatttgaactcacccgccgtctggagcatgactttggcaaggtgacaaagcaggaagtcaaagagttcttccgctgggcgcaggatcacgtgaccgaggtggcgcatgagttctacgtcagaaagggtggagccaacaagagacccgcccccgatgacgcggataaaagcgagcccaagcgggcctgcccctcagtcgcggatccatcgacgtcagacgcggaaggagctccggtggactttgccgacaggtaccaaaacaaatgttctcgtcacgcgggcatgcttcagatgctgtttccctgcaaaacatgcgagagaatgaatcagaatttcaacatttgcttcacgcacgggaccagagactgttcagaatgtttccccggcgtgtcagaatctcaaccggtcgtcagaaagaggacgtatcggaaactctgtgccattcatcatctgctggggcgggctcccgagattgcttgctcggcctgcgatctggtcaacgtggatctggatgactgtgtttctgagcaataaatgacttaaaccaggtatggctgccgatggttatcttccagattggctcgaggacaacctctctgagggcattcgcgagtggtgggacttgaaacctggagccccgaaacccaaagccaaccagcaaaagcaggacgacggccggggtctggtgcttcctggctacaagtacctcggacccttcaacggactcgacaagggggagcccgtcaacgcggcggatgcagcggccctcgagcacgacaaggcctacgaccagcagctcaaagcgggtgacaatccgtacctgcggtataaccacgccgacgccgagtttcaggagcgtctgcaagaagatacgtcttttgggggcaacctcgggcgagcagtcttccaggccaagaagagggttctcgaaccttttggtctggttgaggaaggtgctaagacggctcctggaaagaaacgtccggtagagcagtcgccacaagagccagactcctcctcgggcattggcaagacaggccagcagcccgctaaaaagagactcaattttggtcagactggcgactcagagtcagtccccgacccacaacctctcggagaacctccagcaacccccgctgctgtgggacctactacaatggcttcaggcggtggcgcaccaatggcagacaataacgaaggcgccgacggagtgggtaatgcctcaggaaattggcattgcgattccacatggctgggcgacagagtcatcaccaccagcacccgaacatgggccttgcccacctataacaaccacctctacaagcaaatctccagtgcttcaacgggggccagcaacgacaaccactacttcggctacagcaccccctgggggtattttgatttcaacagattccactgccatttctcaccacgtgactggcagcgactcatcaacaacaattggggattccggcccaagagactcaacttcaagctcttcaacatccaagtcaaggaggtcacgacgaatgatggcgtcacgaccatcgctaataaccttaccagcacggttcaagtcttctcggactcggagtaccagttgccgtacgtcctcggctctgcgcaccagggctgcctccctccgttcccggcggacgtgttcatgattccgcagtacggctacctaacgctcaacaatggcagccaggcagtgggacggtcatccttttactgcctggaatatttcccatcgcagatgctgagaacgggcaataactttaccttcagctacaccttcgaggacgtgcctttccacagcagctacgcgcacagccagagcctggaccggctgatgaatcctctcatcgaccagtacctgtattacctgaacagaactcagaatcagtccggaagtgcccaaaacaaggacttgctgtttagccgggggtctccagctggcatgtctgttcagcccaaaaactggctacctggaccctgttaccggcagcagcgcgtttctaaaacaaaaacagacaacaacaacagcaactttacctggactggtgcttcaaaatataaccttaatgggcgtgaatctataatcaaccctggcactgctatggcctcacacaaagacgacaaagacaagttctttcccatgagcggtgtcatgatttttggaaaggagagcgccggagcttcaaacactgcattggacaatgtcatgatcacagacgaagaggaaatcaaagccactaaccccgtggccaccgaaagatttgggactgtggcagtcaatctccagagcagcagcacagaccctgcgaccggagatgtgcatgttatgggagccttacctggaatggtgtggcaagacagagacgtatacctgcagggtcctatttgggccaaaattcctcacacggatggacactttcacccgtctcctctcatgggcggctttggacttaagcacccgcctcctcagatcctcatcaaaaacacgcctgttcctgcgaatcctccggcagagttttcggctacaaagtttgcttcattcatcacccagtattccacaggacaagtgagcgtggagattgaatgggagctgcagaaagaaaacagcaaacgctggaatcccgaagtgcagtatacatctaactatgcaaaatctgccaacgttgatttcactgtggacaacaatggactttatactgagcctcgccccattggcacccgttacctcacccgtcccctgtaattgtgtgttaatcaataaaccggttaattcgtgtcagttgaactttggtctcatgtcgttattatcttatctggtcaccatagcaaccggttacacattaactgcttagttgcgcttcgcgaatacccctagtgatggagttgcccactccctctatgcgcgctcgctcgctcggtggggccggcagagcagagctctgccgtctgcggacctttggtccgcaggccccaccgagcgagcgagcgcgcatagagggagtgggcaa

SEQ ID NO: 108 - DNA, 2211 bp, Artificial Sequence
  Description of Artificial Sequence: Synthetic polynucleotide
atggctgccgatggttatcttccagattggctcgaggacaacctctctgagggcattcgcgagtggtgggacttgaaacctggagccccgaaacccaaagccaaccagcaaaagcaggacgacggccggggtctggtgcttcctggctacaagtacctcggacccttcaacggactcgacaagggggagcccgtcaacgcggcggatgcagcggccctcgagcacgacaaggcctacgaccagcagctcaaagcgggtgacaatccgtacctgcggtataaccacgccgacgccgagtttcaggagcgtctgcaagaagatacgtcttttgggggcaacctcgggcgagcagtcttccaggccaagaagagggttctcgaaccttttggtctggttgaggaaggtgctaagacggctcctggaaagaaacgtccggtagagcagtcgccacaagagccagactcctcctcgggcattggcaagacaggccagcagcccgctaaaaagagactcaattttggtcagactggcgactcagagtcagtccccgacccacaacctctcggagaacctccagcaacccccgctgctgtgggacctactacaatggcttcaggcggtggcgcaccaatggcagacaataacgaaggcgccgacggagtgggtaatgcctcaggaaattggcattgcgattccacatggctgggcgacagagtcatcaccaccagcacccgaacatgggccttgcccacctataacaaccacctctacaagcaaatctccagtgcttcaacgggggccagcaacgacaaccactacttcggctacagcaccccctgggggtattttgatttcaacagattccactgccatttctcaccacgtgactggcagcgactcatcaacaacaattggggattccggcccaagagactcaacttcaagctcttcaacatccaagtcaaggaggtcacgacgaatgatggcgtcacgaccatcgctaataaccttaccagcacggttcaagtcttctcggactcggagtaccagttgccgtacgtcctcggctctgcgcaccagggctgcctccctccgttcccggcggacgtgttcatgattccgcagtacggctacctaacgctcaacaatggcagccaggcagtgggacggtcatccttttactgcctggaatatttcccatcgcagatgctgagaacgggcaataactttaccttcagctacaccttcgaggacgtgcctttccacagcagctacgcgcacagccagagcctggaccggctgatgaatcctctcatcgaccagtacctgtattacctgaacagaactcagaatcagtccggaagtgcccaaaacaaggacttgctgtttagccgggggtctccagctggcatgtctgttcagcccaaaaactggctacctggaccctgttaccggcagcagcgcgtttctaaaacaaaaacagacaacaacaacagcaactttacctggactggtgcttcaaaatataaccttaatgggcgtgaatctataatcaaccctggcactgctatggcctcacacaaagacgacaaagacaagttctttcccatgagcggtgtcatgatttttggaaaggagagcgccggagcttcaaacactgcattggacaatgtcatgatcacagacgaagaggaaatcaaagccactaaccccgtggccaccgaaagatttgggactgtggcagtcaatctccagagcagcagcacagaccctgcgaccggagatgtgcatgttatgggagccttacctggaatggtgtggcaagacagagacgtatacctgcagggtcctatttgggccaaaattcctcacacggatggacactttcacccgtctcctctcatgggcggctttggacttaagcacccgcctcctcagatcctcatcaaaaacacgcctgttcctgcgaatcctccggcagagttttcggctacaaagtttgcttcattcatcacccagtattccacaggacaagtgagcgtggagattgaatgggagctgcagaaagaaaacagcaaacgctggaatcccgaagtgcagtatacatctaactatgcaaaatctgccaacgttgatttcactgtggacaacaatggactttatactgagcctcgccccattggcacccgttacctcacccgtcccctgtaa

SEQ ID NO: 109 - protein, 736 aa, Artificial Sequence; identical to SEQ ID NO: 105
  Description of Artificial Sequence: Synthetic polypeptide

SEQ ID NO: 110 - protein, 736 aa, Artificial Sequence
  Description of Artificial Sequence: Synthetic polypeptide
MAADGYLPDWLEDNLSEGIREWWDLKPGAPKPKANQQKQDDGRGLVLPGYKYLGPFNGLDKGEPVNAADAAALEHDKAYDQQLKAGDNPYLRYNHADAEFQERLQEDTSFGGNLGRAVFQAKKRVLEPFGLVEEGAKTAPGKKRPVEQSPQEPDSSSGIGKTGQQPAKKRLNFGQTGDSESVPDPQPLGEPPATPAAVGPTTMASGGGAPMADNNEGADGVGNASGNWHCDSTWLGDRVITTSTRTWALPTYNNHLYKQISSASTGASNDNHYFGYSTPWGYFDFNRFHCHFSPRDWQRLINNNWGFRPKRLNFKLFNIQVKEVTTNDGVTTIANNLTSTVQVFSDSEYQLPYVLGSAHQGCLPPFPADVFMIPQYGYLTLNNGSQAVGRSSFYCLEYFPSQMLRTGNNFTFSYTFEDVPFHSSYAHSQSLDRLMNPLIDQYLYYLNRTQNQSGSAQNKDLLFSRGSPAGMSVQPKNWLPGPCYRQQRVSKTKTDNNNSNFTWTGASKYNLNGRESIINPGTAMASHKDDEDKFFPMSGVMIFGKESAGASNTALDNVMITDEEEIKATNPVATERFGTVAVNLQSSSTDPATGDVHVMGALPGMVWQDRDVYLQGPIWAKIPHTDGHFHPSPLMGGFGLKHPPPQILIKNTPVPANPPAEFSATKFASFITQYSTGQVSVEIEWELQKENSKRWNPEVQYTSNYAKSANVDFTVDNNGLYTEPRPIGTRYLTRPL

SEQ ID NO: 111 - protein, 736 aa, Artificial Sequence
  Description of Artificial Sequence: Synthetic polypeptide
MAADGYLPDWLEDNLSEGIREWWDLKPGAPKPKANQQKQDDGRGLVLPGYKYLGPFNGLDKGEPVNAADAAALEHDKAYDQQLKAGDNPYLRYNHADAEFQERLQEDTSFGGNLGRAVFQAKKRVLEPLGLVEEGAKTAPGKKRPVEQSPQEPDSSSGIGKTGQQPAKKRLNFGQTGDSESVPDPQPLGEPPATPAAVGPTTMASGGGAPMADNNEGADGVGNASGNWHCDSTWLGDRVITTSTRTWALPTYNNHLYKQISSASTGASNDNHYFGYSTPWGYFDFNRFHCHFSPRDWQRLINNNWGFRPKRLNFKLFNIQVKEVTTNDGVTTIANNLTSTVQVFSDSEYQLPYVLGSAHQGCLPPFPADVFMIPQYGYLTLNNGSQAVGRSSFYCLEYFPSQMLRTGNNFTFSYTFEDVPFHSSYAHSQSLDRLMNPLIDQYLYYLNRTQNQSGSAQNKDLLFSRGSPAGMSVQPKNWLPGPCYRQQRVSKTKTDNNNSNFTWTGASKYNLNGRESIINPGTAMASHKDDEDKFFPMSGVMIFGKESAGASNTALDNVMITDEEEIKATNPVATERFGTVAVNLQSSSTDPATGDVHVMGALPGMVWQDRDVYLQGPIWAKIPHTDGHFHPSPLMGGFGLKHPPPQILIKNTPVPANPPAEFSATKFASFITQYSTGQVSVEIEWELQKENSKRWNPEVQYTSNYAKSANVDFTVDNNGLYTEPRPIGTRYLTRPL

SEQ ID NO: 112 - protein, 736 aa, Artificial Sequence
  Description of Artificial Sequence: Synthetic polypeptide
MAADGYLPDWLEDNLSEGIREWWDLKPGAPKPKANQQKQDDGRGLVLPGYKYLGPFNGLDKGEPVNAADAAALEHDKAYDQQLKAGDNPYLRYNHADAEFQERLQEDTSFGGNLGRAVFQAKKRVLEPLGLVEEGAKTAPGKKRPVEQSPQEPDSSSGIGKTGQQPAKKRLNFGQTGDSESVPDPQPLGEPPATPAAVGPTTMASGGGAPMADNNEGADGVGNASGNWHCDSTWLGDRVITTSTRTWALPTYNNHLYKQISSASTGASNDNHYFGYSTPWGYFDFNRFHCHFSPRDWQRLINNNWGFRPKRLNFKLFNIQVKEVTTNDGVTTIANNLTSTVQVFSDSEYQLPYVLGSAHQGCLPPFPADVFMIPQYGYLTLNNGSQAVGRSSFYCLEYFPSQMLRTGNNFTFSYTFEDVPFHSSYAHSQSLDRLMNPLIDQYLYYLNRTQNQSGSAQNKDLLFSRGSPAGMSVQPKNWLPGPCYRQQRVSKTKTDNNNSNFTWTGASKYNLNGRESIINPGTAMASHKDDKDKFFPMSGVMIFGKESAGASNTALDNVMITDEEEIKATNPVATERFGTVAVNLQSSSTDPATGDVHVMGALPGMVWQDRDVYLQGPIWAKIPHTDGHFHPSPLMGGFGLKHPPPQILIKNTPVPANPPAEFSATKFASFITQYSTGQVSVEIEWELQKENSKRWNPEVQYTSNYAKSANVDFTVDNNGLYTEPRPIGTRYLTRPL

SEQ ID NO: 113 - DNA, 2214 bp, Artificial Sequence
  Description of Artificial Sequence: Synthetic polynucleotide
atggctgccgatggttatcttccagattggctcgaggacaacctctctgagggcattcgcgagtggtgggacctgaaacctggagccccgaaacccaaagccaaccagcaaaagcaggacaacggccggggtctggtgcttcctggctacaagtacctcggacccttcaacggactcgacaagggggagcccgtcaacgcggcggacgcagcggccctcgagcacgacaaggcctacgaccagcagctcaaagcgggtgacaatccgtacctgcggtataaccacgccgacgccgagtttcaggagcgtctgcaagaagatacgtcatttgggggcaacctcgggcgagcagtcttccaggccaagaagcgggttctcgaacctctcggtctggttgaggaaggcgctaagacggctcctgcaaagaagagaccggtagagccgtcacctcagcgttcccccgactcctccacgggcatcggcaagaaaggccagcagcccgccagaaagagactcaatttcggtcagactggcgactcagagtcagtccccgaccctcaacctctcggagaacctccagcagcgccctctagtgtgggatctggtacagtggctgcaggcggtggcgcaccaatggcagacaataacgaaggtgccgacggagtgggtaatgcctcaggaaattggcattgcgattccacatggctgggcgacagagtcattaccaccagcacccgaacctgggccctgcccacctacaacaaccacctctacaagcaaatctccagtgaaactgcaggtagtaccaacgacaacacctacttcggctacagcaccccctgggggtattttgactttaacagattccactgccacttctcaccacgtgactggcagcgactcatcaacaacaactggggattccggcccaagaagctgcggttcaagctcttcaacatccaggtcaaggaggtcacgacgaatgacggcgttacgaccatcgctaataaccttaccagcacgattcaggtattctcggactcggaataccagctgccgtacgtcctcggctctgcgcaccagggctgcctgcctccgttcccggcggacgtcttcatgattcctcagtacggctacctgactctcaacaatggcagtcagtctgtgggacgttcctccttctactgcctggagtacttcccctctcagatgctgagaacgggcaacaactttgagttcagctacagcttcgaggacgtgcctttccacagcagctacgcacacagccagagcctggaccggctgatgaatcccctcatcgaccagtacttgtactacctggccagaacacagagtaacccaggaggcacagctggcaatcgggaactgcagttttaccagggcgggccttcaactatggccgaacaagccaagaattggttacctggaccttgcttccggcaacaaagagtctccaaaacgctggatcaaaacaacaacagcaactttgcttggactggtgccaccaaatatcacctgaacggcagaaactcgttggttaatcccggcgtcgccatggcaactcacaaggacgacgaggaccgctttttcccatccagcggagtcctgatttttggaaaaactggagcaactaacaaaactacattggaaaatgtgttaatgacaaatgaagaagaaattcgtcctactaatcctgtagccacggaagaatacgggatagtcagcagcaacttacaagcggctaatactgcagcccagacacaagttgtcaacaaccagggagccttacctggcatggtctggcagaaccgggacgtgtacctgcagggtcccatctgggccaagattcctcacacggatggcaactttcacccgtctcctttgatgggcggctttggacttaaacatccgcctcctcagatcctgatcaagaacactcccgttcccgctaatcctccggaggtgtttactcctgccaagtttgcttcgttcatcacacagtacagcaccggacaagtcagcgtggaaatcgagtgggagctgcagaaggaaaacagcaagcgctggaacccggagattcagtacacctccaactttgaaaagcagactggtgtggactttgccgttgacagccagggtgtttactctgagcctcgccctattggcactcgttacctcacccgtaatctgtaa

SEQ ID NO: 114 - protein, 738 aa, Artificial Sequence
  Description of Artificial Sequence: Synthetic polypeptide
MAADGYLPDWLEDNLSEGIREWWALKPGAPKPKANQQKQDDGRGLVLPGYKYLGPFNGLDKGEPVNAADAAALEHDKAYDQQLQAGDNPYLRYNHADAEFQERLQEDTSFGGNLGRAVFQAKKRVLEPLGLVEEGAKTAPGKKRPVEPSPQRSPDSSTGIGKKGQQPARKRLNFGQTGDSESVPDPQPLGEPPAAPSGVGPNTMAAGGGAPMADNNEGADGVGSSSGNWHCDSTWLGDRVITTSTRTWALPTYNNHLYKQISNGTSGGATNDNTYFGYSTPWGYFDFNRFHCHFSPRDWQRLINNNWGFRPKRLSFKLFNIQVKEVTQNEGTKTIANNLTSTIQVFTDSEYQLPYVLGSAHQGCLPPFPADVFMIPQYGYLTLNNGSQAVGRSSFYCLEYFPSQMLRTGNNFQFTYTFEDVPFHSSYAHSQSLDRLMNPLIDQYLYYLSRTQTTGGTANTQTLGFSQGGPNTMANQAKNWLPGPCYRQQRVSTTTGQNNNSNFAWTAGTKYHLNGRNSLANPGIAMATHKDDEERFFPSNGILIFGKQNAARDNADYSDVMLTSEEEIKTTNPVATEEYGIVADNLQQQNTAPQIGTVNSQGALPGMVWQNRDVYLQGPIWAKIPHTDGNFHPSPLMGGFGLKHPPPQILIKNTPVPADPPTTFNQSKLNSFITQYSTGQVSVEIEWELQKENSKRWNPEIQYTSNYYKSTSVDFAVNTEGVYSEPRPIGTRYLTRNL

SEQ ID NO: 115 - protein, 737 aa, Adeno-associated virus 7
MAADGYLPDWLEDNLSEGIREWWDLKPGAPKPKANQQKQDNGRGLVLPGYKYLGPFNGLDKGEPVNAADAAALEHDKAYDQQLKAGDNPYLRYNHADAEFQERLQEDTSFGGNLGRAVFQAKKRVLEPLGLVEEGAKTAPAKKRPVEPSPQRSPDSSTGIGKKGQQPARKRLNFGQTGDSESVPDPQPLGEPPAAPSSVGSGTVAAGGGAPMADNNEGADGVGNASGNWHCDSTWLGDRVITTSTRTWALPTYNNHLYKQISSETAGSTNDNTYFGYSTPWGYFDFNRFHCHFSPRDWQRLINNNWGFRPKKLRFKLFNIQVKEVTTNDGVTTIANNLTSTIQVFSDSEYQLPYVLGSAHQGCLPPFPADVFMIPQYGYLTLNNGSQSVGRSSFYCLEYFPSQMLRTGNNFEFSYSFEDVPFHSSYAHSQSLDRLMNPLIDQYLYYLARTQSNPGGTAGNRELQFYQGGPSTMAEQAKNWLPGPCFRQQRVSKTLDQNNNSNFAWTGATKYHLNGRNSLVNPGVAMATHKDDEDRFFPSSGVLIFGKTGATNKTTLENVLMTNEEEIRPTNPVATEEYGIVSSNLQAANTAAQTQVVNNQGALPGMVWQNRDVYLQGPIWAKIPHTDGNFHPSPLMGGFGLKHPPPQILIKNTPVPANPPEVFTPAKFASFITQYSTGQVSVEIEWELQKENSKRWNPEIQYTSNFEKQTGVDFAVDSQGVYSEPRPIGTRYLTRNL

SEQ ID NO: 116 - protein, 623 aa, Adeno-associated virus 7
MPGFYEIVIKVPSDLDEHLPGISDSFVNWVAEKEWELPPDSDMDLNLIEQAPLTVAEKLQRDFLVQWRRVSKAPEALFFVQFEKGESYFHLHVLVETTGVKSMVLGRFLSQIREKLVQTIYRGVEPTLPNWFAVTKTRNGAGGGNKVVDECYIPNYLLPKTQPELQWAWTNMEEYISACLNLAERKRLVAQHLTHVSQTQEQNKENLNPNSDAPVIRSKTSARYMELVGWLVDRGITSEKQWIQEDQASYISFNAASNSRSQIKAALDNAGKIMALTKSAPDYLVGPSLPADIKTNRIYRILELNGYDPAYAGSVFLGWAQKKFGKRNTIWLFGPATTGKTNIAEAIAHAVPFYGCVNWTNENFPFNDCVDKMVIWWEEGKMTAKVVESAKAILGGSKVRVDQKCKSSAQIDPTPVIVTSNTNMCAVIDGNSTTFEHQQPLQDRMFKFELTRRLEHDFGKVTKQEVKEFFRWASDHVTEVAHEFYVRKGGASKRPAPDDADISEPKRACPSVADPSTSDAEGAPVDFADRYQNKCSRHAGMIQMLFPCKTCERMNQNFNICFTHGVRDCLECFPGVSESQPVVRKKTYRKLCAIHHLLGRAPEIACSACDLVNVDLDDCVSEQ

SEQ ID NO: 117 - DNA, 4721 bp, Adeno-associated virus 7
ttggccactccctctatgcgcgctcgctcgctcggtggggcctgcggaccaaaggtccgcagacggcagagctctgctctgccggccccaccgagcgagcgagcgcgcatagagggagtggccaactccatcactaggggtaccgcgaagcgcctcccacgctgccgcgtcagcgctgacgtaaatcacgtcataggggagtggtcctgtattagctgtcacgtgagtgcttttgcgacattttgcgacaccacgtggccatttgaggtatatatggccgagtgagcgagcaggatctccattttgaccgcgaaatttgaacgagcagcagccatgccgggtttctacgagatcgtgatcaaggtgccgagcgacctggacgagcacctgccgggcatttctgactcgtttgtgaactgggtggccgagaaggaatgggagctgcccccggattctgacatggatctgaatctgatcgagcaggcacccctgaccgtggccgagaagctgcagcgcgacttcctggtccaatggcgccgcgtgagtaaggccccggaggccctgttctttgttcagttcgagaagggcgagagctacttccaccttcacgttctggtggagaccacgggggtcaagtccatggtgctaggccgcttcctgagtcagattcgggagaagctggtccagaccatctaccgcggggtcgagcccacgctgcccaactggttcgcggtgaccaagacgcgtaatggcgccggcggggggaacaaggtggtggacgagtgctacatccccaactacctcctgcccaagacccagcccgagctgcagtgggcgtggactaacatggaggagtatataagcgcgtgtttgaacctggccgaacgcaaacggctcgtggcgcagcacctgacccacgtcagccagacgcaggagcagaacaaggagaatctgaaccccaattctgacgcgcccgtgatcaggtcaaaaacctccgcgcgctacatggagctggtcgggtggctggtggaccggggcatcacctccgagaagcagtggatccaggaggaccaggcctcgtacatctccttcaacgccgcctccaactcgcggtcccagatcaaggccgcgctggacaatgccggcaagatcatggcgctgaccaaatccgcgcccgactacctggtggggccctcgctgcccgcggacattaaaaccaaccgcatctaccgcatcctggagctgaacgggtacgatcctgcctacgccggctccgtctttctcggctgggcccagaaaaagttcgggaagcgcaacaccatctggctgtttgggcccgccaccaccggcaagaccaacattgcggaagccatcgcccacgccgtgcccttctacggctgcgtcaactggaccaatgagaactttcccttcaacgattgcgtcgacaagatggtgatctggtgggaggagggcaagatgacggccaaggtcgtggagtccgccaaggccattctcggcggcagcaaggtgcgcgtggaccaaaagtgcaagtcgtccgcccagatcgaccccacccccgtgatcgtcacctccaacaccaacatgtgcgccgtgattgacgggaacagcaccaccttcgagcaccagcagccgttgcaggaccggatgttcaaatttgaactcacccgccgtctggagcacgactttggcaaggtgacgaagcaggaagtcaaagagttcttccgctgggccagtgatcacgtgaccgaggtggcgcatgagttctacgtcagaaagggcggagccagcaaaagacccgcccccgatgacgcggatataagcgagcccaagcgggcctgcccctcagtcgcggatccatcgacgtcagacgcggaaggagctccggtggactttgccgacaggtaccaaaacaaatgttctcgtcacgcgggcatgattcagatgctgtttccctgcaaaacgtgcgagagaatgaatcagaatttcaacatttgcttcacacacggggtcagagactgtttagagtgtttccccggcgtgtcagaatctcaaccggtcgtcagaaaaaagacgtatcggaaactctgcgcgattcatcatctgctggggcgggcgcccgagattgcttgctcggcctgcgacctggtcaacgtggacctggacgactgcgtttctgagcaataaatgacttaaaccaggtatggctgccgatggttatcttccagattggctcgaggacaacctctctgagggcattcgcgagtggtgggacctgaaacctggagccccgaaacccaaagccaaccagcaaaagcaggacaacggccggggtctggtgcttcctggctacaagtacctcggacccttcaacggactcgacaagggggagcccgtcaacgcggcggacgcagcggccctcgagcacgacaaggcctacgaccagcagctcaaagcgggtgacaatccgtacctgcggtataaccacgccgacgccgagtttcaggagcgtctgcaagaagatacgtcatttgggggcaacctcgggcgagcagtcttccaggccaagaagcgggttctcgaacctctcggtctggttgaggaaggcgctaagacggctcctgcaaagaagagaccggtagagccgtcacctcagcgttcccccgactcctccacgggcatcggcaagaaaggccagcagcccgccagaaagagactcaatttcggtcagactggcgactcagagtcagtccccgaccctcaacctctcggagaacctccagcagcgccctctagtgtgggatctggtacagtggctgcaggcggtggcgcaccaatggcagacaataacgaaggtgccgacggagtgggtaatgcctcaggaaattggcattgcgattccacatggctgggcgacagagtcattaccaccagcacccgaacctgggccctgcccacctacaacaaccacctctacaagcaaatctccagtgaaactgcaggtagtaccaacgacaacacctacttcggctacagcaccccctgggggtattttgactttaacagattccactgccacttctcaccacgtgactggcagcgactcatcaacaacaactggggattccggcccaagaagctgcggttcaagctcttcaacatccaggtcaaggaggtcacgacgaatgacggcgttacgaccatcgctaataaccttaccagcacgattcaggtattctcggactcggaataccagctgccgtacgtcctcggctctgcgcaccagggctgcctgcctccgttcccggcggacgtcttcatgattcctcagtacggctacctgactctcaacaatggcagtcagtctgtgggacgttcctccttctactgcctggagtacttcccctctcagatgctgagaacgggcaacaactttgagttcagctacagcttcgaggacgtgcctttccacagcagctacgcacacagccagagcctggaccggctgatgaatcccctcatcgaccagtacttgtactacctggccagaacacagagtaacccaggaggcacagctggcaatcgggaactgcagttttaccagggcgggccttcaactatggccgaacaagccaagaattggttacctggaccttgcttccggcaacaaagagtctccaaaacgctggatcaaaacaacaacagcaactttgcttggactggtgccaccaaatatcacctgaacggcagaaactcgttggttaatcccggcgtcgccatggcaactcacaaggacgacgaggaccgctttttcccatccagcggagtcctgatttttggaaaaactggagcaactaacaaaactacattggaaaatgtgttaatgacaaatgaagaagaaattcgtcctactaatcctgtagccacggaagaatacgggatagtcagcagcaacttacaagcggctaatactgcagcccagacacaagttgtcaacaaccagggagccttacctggcatggtctggcagaaccgggacgtgtacctgcagggtcccatctgggccaagattcctcacacggatggcaactttcacccgtctcctttgatgggcggctttggacttaaacatccgcctcctcagatcctgatcaagaacactcccgttcccgctaatcctccggaggtgtttactcctgccaagtttgcttcgttcatcacacagtacagcaccggacaagtcagcgtggaaatcgagtgggagctgcagaaggaaaacagcaagcgctggaacccggagattcagtacacctccaactttgaaaagcagactggtgtggactttgccgttgacagccagggtgtttactctgagcctcgccctattggcactcgttacctcacccgtaatctgtaattgcatgttaatcaataaaccggttgattcgtttcagttgaactttggtctcctgtgcttcttatcttatcggtttccatagcaactggttacacattaactgcttgggtgcgcttcacgataagaacactgacgtcaccgcggtacccctagtgatggagttggccactccctctatgcgcgctcgctcgctcggtggggcctgcggaccaaaggtccgcagacggcagagctctgctctgccggccccaccgagcgagcgagcgcgcatagagggagtggccaa

SEQ ID NO: 118 - DNA, 2214 bp, Artificial Sequence; identical to SEQ ID NO: 113
  Description of Artificial Sequence: Synthetic polynucleotide

SEQ ID NO: 119 - protein, 737 aa, Artificial Sequence; identical to SEQ ID NO: 115
  Description of Artificial Sequence: Synthetic polypeptide

SEQ ID NO: 120 - DNA, 2217 bp, Artificial Sequence
  Description of Artificial Sequence: Synthetic polynucleotide
atggctgccgatggttatcttccagattggctcgaggacaacctctctgagggcattcgcgagtggtgggcgctgaaacctggagccccgaagcccaaagccaaccagcaaaagcaggacgacggccggggtctggtgcttcctggctacaagtacctcggacccttcaacggactcgacaagggggagcccgtcaacgcggcggacgcagcggccctcgagcacgacaaggcctacgaccagcagctgcaggcgggtgacaatccgtacctgcggtataaccacgccgacgccgagtttcaggagcgtctgcaagaagatacgtcttttgggggcaacctcgggcgagcagtcttccaggccaagaagcgggttctcgaacctctcggtctggttgaggaaggcgctaagacggctcctggaaagaagagaccggtagagccatcaccccagcgttctccagactcctctacgggcatcggcaagaaaggccaacagcccgccagaaaaagactcaattttggtcagactggcgactcagagtcagttccagaccctcaacctctcggagaacctccagcagcgccctctggtgtgggacctaatacaatggctgcaggcggtggcgcaccaatggcagacaataacgaaggcgccgacggagtgggtagttcctcgggaaattggcattgcgattccacatggctgggcgacagagtcatcaccaccagcacccgaacctgggccctgcccacctacaacaaccacctctacaagcaaatctccaacgggacatcgggaggagccaccaacgacaacacctacttcggctacagcaccccctgggggtattttgactttaacagattccactgccacttttcaccacgtgactggcagcgactcatcaacaacaactggggattccggcccaagagactcagcttcaagctcttcaacatccaggtcaaggaggtcacgcagaatgaaggcaccaagaccatcgccaataacctcaccagcaccatccaggtgtttacggactcggagtaccagctgccgtacgttctcggctctgcccaccagggctgcctgcctccgttcccggcggacgtgttcatgattccccagtacggctacctaacactcaacaacggtagtcaggccgtgggacgctcctccttctactgcctggaatactttccttcgcagatgctgagaaccggcaacaacttccagtttacttacaccttcgaggacgtgcctttccacagcagctacgcccacagccagagcttggaccggctgatgaatcctctgattgaccagtacctgtactacttgtctcggactcaaacaacaggaggcacggcaaatacgcagactctgggcttcagccaaggtgggcctaatacaatggccaatcaggcaaagaactggctgccaggaccctgttaccgccaacaacgcgtctcaacgacaaccgggcaaaacaacaatagcaactttgcctggactgctgggaccaaataccatctgaatggaagaaattcattggctaatcctggcatcgctatggcaacacacaaagacgacgaggagcgtttttttcccagtaacgggatcctgatttttggcaaacaaaatgctgccagagacaatgcggattacagcgatgtcatgctcaccagcgaggaagaaatcaaaaccactaaccctgtggctacagaggaatacggtatcgtggcagataacttgcagcagcaaaacacggctcctcaaattggaactgtcaacagccagggggccttacccggtatggtctggcagaaccgggacgtgtacctgcagggtcccatctgggccaagattcctcacacggacggcaacttccacccgtctccgctgatgggcggctttggcctgaaacatcctccgcctcagatcctgatcaagaacacgcctgtacctgcggatcctccgaccaccttcaaccagtcaaagctgaactctttcatcacgcaatacagcaccggacaggtcagcgtggaaattgaatgggagctgcagaaggaaaacagcaagcgctggaaccccgagatccagtacacctccaactactacaaatctacaagtgtggactttgctgttaatacagaaggcgtgtactctgaaccccgccccattggcacccgttacctcacccgtaatctgtaa

SEQ ID NO: 121 - DNA, 2213 bp, Adeno-associated virus 8
atggctgccgatggttatcttccagattggctcgaggacaacctctctgagggcattcgcgagtggtgggcgctgaaacctggagccccgaagcccaaagccaaccagcaaaagcaggacgacggccggggtctggtgcttcctggctacaagtacctcggacccttcaacggactcgacaagggggagcccgtcaacgcggcggacgcagcggccctcgagcacgacaaggcctacgaccagcagctgcaggcgggtgacaatccgtacctgcggtataaccacgccgacgccgagtttcaggagcgtctgcaagaagatacgtcttttgggggcaacctcgggcgagcagtcttccaggccaagaagcgggttctcgaacctctcggtctggttgaggaaggcgctaagacggctcctggaaagaagagaccggtagagccatcaccccagcgttctccagactcctctacgggcatcggcaagaaaggccaacagcccgccagaaaaagactcaattttggtcagactggcgactcagagtcagttccagaccctcaacctctcggagaacctccagcagcgccctctggtgtgggacctaatacaatggctgcaggcggtggcgcaccaatggcagacaataacgaaggcgccgacggagtgggtagttcctcgggaaattggcattgcgattccacatggctgggcgacagagtcatcaccaccagcacccgaacctgggccctgcccacctacaacaaccacctctacaagcaaatctccaacgggacatcgggaggagccaccaacgacaacacctacttcggctacagcaccccctgggggtattttgactttaacagattccactgccacttttcaccacgtgactggcagcgactcatcaacaacaactggggattccggcccaagagactcagcttcaagctcttcaacatccaggtcaaggaggtcacgcagaatgaaggcaccaagaccatcgccaataacctcaccagcaccatccaggtgtttacggactcggagtaccagctgccgtacgttctcggctctgcccaccagggctgcctgcctccgttcccggcggacgtgttcatgattccccagtacggctacctaacactcaacaacggtagtcaggccgtgggacgctcctccttctactgcctggaatactttccttcgcagatgctgagaaccggcaacaacttccagtttacttacaccttcgaggacgtgcctttccacagcagctacgcccacagccagagcttggaccggctgatgaatcctctgattgaccagtacctgtactacttgtctcggactcaaacaacaggaggcacggcaaatacgcagactctgggcttcagccaaggtgggcctaatacaatggccaatcaggcaaagaactggctgccaggaccctgttaccgccaacaacgcgtctcaacgacaaccgggcaaaacaacaatagcaactttgcctggactgctgggaccaaataccatctgaatggaagaaattcattggctaatcctggcatcgctatggcaacacacaaagacgacgaggagcgtttttttcccagtaacgggatcctgatttttggcaaacaaaatgctgccagagacaatgcggattacagcgatgtcatgctcaccagcgaggaagaaatcaaaaccactaaccctgtggctacagaggaatacggtatcgtggcagataacttgcagcagcaaaacacggctcctcaaattggaactgtcaacagccagggggccttacccggtatggtctggcagaaccgggacgtgtacctgcagggtcccatctgggccaagattcctcacacggacggcaacttccacccgtctccgctgatgggcggctttggcctgaaacatcctccgcctcagatcctgatcaagaacacgcctgtacctgcggatcctccgaccaccttcaaccagtcaaagctgaactctttcatcacgcaatacagcaccggacaggtcagcgtggaaattgaatgggagctgcagaaggaaaacagcaagcgctggaaccccgagatccagtacacctccaactactacaaatctacaagtgtggactttgctgtaatacagaaggcgtgtactctgaaccccgccccattggcacccgttacctcacccgtaatctg

SEQ ID NO: 122 - DNA, 4393 bp, Adeno-associated virus 8
cagagagggagtggccaactccatcactaggggtagcgcgaagcgcctcccacgctgccgcgtcagcgctgacgtaaattacgtcataggggagtggtcctgtattagctgtcacgtgagtgcttttgcggcattttgcgacaccacgtggccatttgaggtatatatggccgagtgagcgagcaggatctccattttgaccgcgaaatttgaacgagcagcagccatgccgggcttctacgagatcgtgatcaaggtgccgagcgacctggacgagcacctgccgggcatttctgactcgtttgtgaactgggtggccgagaaggaatgggagctgcccccggattctgacatggatcggaatctgatcgagcaggcacccctgaccgtggccgagaagctgcagcgcgacttcctggtccaatggcgccgcgtgagtaaggccccggaggccctcttctttgttcagttcgagaagggcgagagctactttcacctgcacgttctggtcgagaccacgggggtcaagtccatggtgctaggccgcttcctgagtcagattcgggaaaagcttggtccagaccatctacccgcggggtcgagccccaccttgcccaactggttcgcggtgaccaaagacgcggtaatggcgccggcgggggggaacaaggtggtggacgagtgctacatccccaactacctcctgcccaagactcagcccgagctgcagtgggcgtggactaacatggaggagtatataagcgcgtgcttgaacctggccgagcgcaaacggctcgtggcgcagcacctgacccacgtcagccagacgcaggagcagaacaaggagaatctgaaccccaattctgacgcgcccgtgatcaggtcaaaaacctccgcgcgctatatggagctggtcgggtggctggtggaccggggcatcacctccgagaagcagtggatccaggaggaccaggcctcgtacatctccttcaacgccgcctccaactcgcggtcccagatcaaggccgcgctggacaatgccggcaagatcatggcgctgaccaaatccgcgcccgactacctggtggggccctcgctgcccgcggacattacccagaaccgcatctaccgcatcctcgctctcaacggctacgaccctgcctacgccggctccgtctttctcggctgggctcagaaaaagttcgggaaacgcaacaccatctggctgtttggacccgccaccaccggcaagaccaacattgcggaagccatcgcccacgccgtgcccttctacggctgcgtcaactggaccaatgagaactttcccttcaatgattgcgtcgacaagatggtgatctggtgggaggagggcaagatgacggccaaggtcgtggagtccgccaaggccattctcggcggcagcaaggtgcgcgtggaccaaaagtgcaagtcgtccgcccagatcgaccccacccccgtgatcgtcacctccaacaccaacatgtgcgccgtgattgacgggaacagcaccaccttcgagcaccagcagcctctccaggaccggatgtttaagttcgaactcacccgccgtctggagcacgactttggcaaggtgacaaagcaggaagtcaaagagttcttccgctgggccagtgatcacgtgaccgaggtggcgcatgagttttacgtcagaaagggcggagccagcaaaagacccgcccccgatgacgcggataaaagcgagcccaagcgggcctgcccctcagtcgcggatccatcgacgtcagacgcggaaggagctccggtggactttgccgacaggtaccaaaacaaatgttctcgtcacgcgggcatgcttcagatgctgtttccctgcaaaacgtgcgagagaatgaatcagaatttcaacatttgcttcacacacggggtcagagactgctcagagtgtttccccggcgtgtcagaatctcaaccggtcgtcagaaagaggacgtatcggaaactctgtgcgattcatcatctgctggggcgggctcccgagattgcttgctcggcctgcgatctggtcaacgtggacctggatgactgtgtttctgagcaataaatgacttaaaccaggtatggctgccgatggttatcttccagattggctcgaggacaacctctctgagggcattcgcgagtggtgggcgctgaaacctggagccccgaagcccaaagccaaccagcaaaagcaggacgacggccggggtctggtgcttcctggctacaagtacctcggacccttcaacggactcgacaagggggagcccgtcaacgcggcggacgcagcggccctcgagcacgacaaggcctacgaccagcagctgcaggcgggtgacaatccgtacctgcggtataaccacgccgacgccgagtttcaggagcgtctgcaagaagatacgtcttttgggggcaacctcgggcgagcagtcttccaggccaagaagcgggttctcgaacctctcggtctggttgaggaaggcgctaagacggctcctggaaagaagagaccggtagagccatcaccccagcgttctccagactcctctacgggcatcggcaagaaaggccaacagcccgccagaaaaagactcaattttggtcagactggcgactcagagtcagttccagaccctcaacctctcggagaacctccagcagcgccctctggtgtgggacctaatacaatggctgcaggcggtggcgcaccaatggcagacaataacgaaggcgccgacggagtgggtagttcctcgggaaattggcattgcgattccacatggctgggcgacagagtcatcaccaccagcacccgaacctgggccctgcccacctacaacaaccacctctacaagcaaatctccaacgggacatcgggaggagccaccaacgacaacacctacttcggctacagcaccccctgggggtattttgactttaacagattccactgccacttttcaccacgtgactggcagcgactcatcaacaacaactggggattccggcccaagagactcagcttcaagctcttcaacatccaggtcaaggaggtcacgcagaatgaaggcaccaagaccatcgccaataacctcaccagcaccatccaggtgtttacggactcggagtaccagctgccgtacgttctcggctctgcccaccagggctgcctgcctccgttcccggcggacgtgttcatgattccccagtacggctacctaacactcaacaacggtagtcaggccgtgggacgctcctccttctactgcctggaatactttccttcgcagatgctgagaaccggcaacaacttccagtttacttacaccttcgaggacgtgcctttccacagcagctacgcccacagccagagcttggaccggctgatgaatcctctgattgaccagtacctgtactacttgtctcggactcaaacaacaggaggcacggcaaatacgcagactctgggcttcagccaaggtgggcctaatacaatggccaatcaggcaaagaactggctgccaggaccctgttaccgccaacaacgcgtctcaacgacaaccgggcaaaacaacaatagcaactttgcctggactgctgggaccaaataccatctgaatggaagaaattcattggctaatcctggcatcgctatggcaacacacaaagacgacgaggagcgtttttttcccagtaacgggatcctgatttttggcaaacaaaatgctgccagagacaatgcggattacagcgatgtcatgctcaccagcgaggaagaaatcaaaaccactaaccctgtggctacagaggaatacggtatcgtggcagataacttgcagcagcaaaacacggctcctcaaattggaactgtcaacagccagggggccttacccggtatggtctggcagaaccgggacgtgtacctgcagggtcccatctgggccaagattcctcacacggacggcaacttccacccgtctccgctgatgggcggctttggcctgaaacatcctccgcctcagatcctgatcaagaacacgcctgtacctgcggatcctccgaccaccttcaaccagtcaaagctgaactctttcatcacgcaatacagcaccggacaggtcagcgtggaaattgaatgggagctgcagaaggaaaacagcaagcgctggaaccccgagatccagtacacctccaactactacaaatctacaagtgtggactttgctgttaatacagaaggcgtgtactctgaaccccgccccattggcacccgttacctcacccgtaatctgtaattgcctgttaatcaataaaccggttgattcgtttcagttgaactttggtctctgcg

SEQ ID NO: 123 - protein, 738 aa, Adeno-associated virus 8; identical to SEQ ID NO: 114

SEQ ID NO: 124 - protein, 737 aa, Adeno-associated virus 8
MAADGYLPDWLEDNLSEGIREWWALKPGAPKPKANQQKQDDGRGLVLPGYKYLGPFNGLDKGEPVNAADAAALEHDKAYDQQLQAGDNPYLRYNHADAEFQERLQEDTSFGGNLGRAVFQAKKRVLEPLGLVEEGAKTAPGKKRPVEPSPQRSPDSSTGIGKKGQQPARKRLNFGQTGDSESVPDPQPLGEPPAAPSGVGPNTMAAGGGAPMADNNEGADGVGSSSGNWHCDSTWLGDRVITTSTRTWALPTYNNHLYKQISNGTSGGATNDNTYFGYSTPWGYFDFNRFHCHFSPRDWQRLINNNWGFRPKRLSFKLFNIQVKEVTQNEGTKTIANNLTSTIQVFTDSEYQLPYVLGSAHQGCLPPFPADVFMIPQYGYLTLNNGSQAVGRSSFYCLEYFPSQMLRTGNNFQFTYTFEDVPFHSSYAHSQSLDRLMNPLIDQYLYYLSRTQTTGGTANTQTLGFSQGGPNTMANQAKNWLPGPCYRQQRVSTTTGQNNNSNFAWTAGTKYHLNGRNSLANPGIAMATHKDDEERFFPSNGILIFGKQNAARDNADYSDVMLTSEEEIKTTNPVATEEYGIVADNLQQQNTAPQIGTVNSQGALPGMVWQNRDVYLQGPIWAKIPHTDGNFHPSPLMGGFGLKHPPPQILIKNTPVPADPPTTFNQSKLNSFITQYSTGQVSVEIEWELQKENSKRWNPEIQYTSNYYKSTSVDFAVIQKACTLNPAPLAPVTSPVI

SEQ ID NO: 125 - DNA, 2217 bp, Artificial Sequence; identical to SEQ ID NO: 120
  Description of Artificial Sequence: Synthetic polynucleotide

SEQ ID NO: 126 - DNA, 2214 bp, Artificial Sequence
  Description of Artificial Sequence: Synthetic polynucleotide
atggctgccgatggttatcttccagattggctcgaggacaacctctctgagggcattcgcgagtggtgggcgctgaaacctggagccccgaagcccaaagccaaccagcaaaagcaggacgacggccggggtctggtgcttcctggctacaagtacctcggacccttcaacggactcgacaagggggagcccgtcaacgcggcggacgcagcggccctcgagcacgacaaggcctacgaccagcagctgcaggcgggtgacaatccgtacctgcggtataaccacgccgacgccgagtttcaggagcgtctgcaagaagatacgtcttttgggggcaacctcgggcgagcagtcttccaggccaagaagcgggttctcgaacctctcggtctggttgaggaaggcgctaagacggctcctggaaagaagagaccggtagagccatcaccccagcgttctccagactcctctacgggcatcggcaagaaaggccaacagcccgccagaaaaagactcaattttggtcagactggcgactcagagtcagttccagaccctcaacctctcggagaacctccagcagcgccctctggtgtgggacctaatacaatggctgcaggcggtggcgcaccaatggcagacaataacgaaggcgccgacggagtgggtagttcctcgggaaattggcattgcgattccacatggctgggcgacagagtcatcaccaccagcacccgaacctgggccctgcccacctacaacaaccacctctacaagcaaatctccaacgggacatcgggaggagccaccaacgacaacacctacttcggctacagcaccccctgggggtattttgactttaacagattccactgccacttttcaccacgtgactggcagcgactcatcaacaacaactggggattccggcccaagagactcagcttcaagctcttcaacatccaggtcaaggaggtcacgcagaatgaaggcaccaagaccatcgccaataacctcaccagcaccatccaggtgtttacggactcggagtaccagctgccgtacgttctcggctctgcccaccagggctgcctgcctccgttcccggcggacgtgttcatgattccccagtacggctacctaacactcaacaacggtagtcaggccgtgggacgctcctccttctactgcctggaatactttccttcgcagatgctgagaaccggcaacaacttccagtttacttacaccttcgaggacgtgcctttccacagcagctacgcccacagccagagcttggaccggctgatgaatcctctgattgaccagtacctgtactacttgtctcggactcaaacaacaggaggcacggcaaatacgcagactctgggcttcagccaaggtgggcctaatacaatggccaatcaggcaaagaactggctgccaggaccctgttaccgccaacaacgcgtctcaacgacaaccgggcaaaacaacaatagcaactttgcctggactgctgggaccaaataccatctgaatggaagaaattcattggctaatcctggcatcgctatggcaacacacaaagacgacgaggagcgtttttttcccagtaacgggatcctgatttttggcaaacaaaatgctgccagagacaatgcggattacagcgatgtcatgctcaccagcgaggaagaaatcaaaaccactaaccctgtggctacagaggaatacggtatcgtggcagataacttgcctgagcggacggcgatgagtcttccgggaactgtcaacagccagggggccttacccggtatggtctggcagaaccgggacgtgtacctgcagggtcccatctgggccaagattcctcacacggacggcaacttccacccgtctccgctgatgggcggctttggcctgaaacatcctccgcctcagatcctgatcaagaacacgcctgtacctgcggatcctccgaccaccttcaaccagtcaaagctgaactctttcatcacgcaatacagcaccggacaggtcagcgtggaaattgaatgggagctgcagaaggaaaacagcaagcgctggaaccccgagatccagtacacctccaactactacaaatctacaagtgtggactttgctgttaatacagaaggcgtgtactctgaaccccgccccattggcacccgttacctcacccgtaatctg

SEQ ID NO: 127 - protein, 738 aa, Artificial Sequence
  Description of Artificial Sequence: Synthetic polypeptide
MAADGYLPDWLEDNLSEGIREWWALKPGAPKPKANQQKQDDGRGLVLPGYKYLGPFNGLDKGEPVNAADAAALEHDKAYDQQLQAGDNPYLRYNHADAEFQERLQEDTSFGGNLGRAVFQAKKRVLEPLGLVEEGAKTAPGKKRPVEPSPQRSPDSSTGIGKKGQQPARKRLNFGQTGDSESVPDPQPLGEPPAAPSGVGPNTMAAGGGAPMADNNEGADGVGSSSGNWHCDSTWLGDRVITTSTRTWALPTYNNHLYKQISNGTSGGATNDNTYFGYSTPWGYFDFNRFHCHFSPRDWQRLINNNWGFRPKRLSFKLFNIQVKEVTQNEGTKTIANNLTSTIQVFTDSEYQLPYVLGSAHQGCLPPFPADVFMIPQYGYLTLNNGSQAVGRSSFYCLEYFPSQMLRTGNNFQFTYTFEDVPFHSSYAHSQSLDRLMNPLIDQYLYYLSRTQTTGGTANTQTLGFSQGGPNTMANQAKNWLPGPCYRQQRVSTTTGQNNNSNFAWTAGTKYHLNGRNSLANPGIAMATHKDDEERFFPSNGILIFGKQNAARDNADYSDVMLTSEEEIKTTNPVATEEYGIVADNLPERTAMSLPGTVNSQGALPGMVWQNRDVYLQGPIWAKIPHTDGNFHPSPLMGGFGLKHPPPQILIKNTPVPADPPTTFNQSKLNSFITQYSTGQVSVEIEWELQKENSKRWNPEIQYTSNYYKSTSVDFAVNTEGVYSEPRPIGTRYLTRNL

SEQ ID NO: 128 - DNA, 2214 bp, Artificial Sequence
  Description of Artificial Sequence: Synthetic polynucleotide
atggctgccgatggttatcttccagattggctcgaggacaacctctctgagggcattcgcgagtggtgggcgctgaaacctggagccccgaagcccaaagccaaccagcaaaagcaggacgacggccggggtctggtgcttcctggctacaagtacctcggacccttcaacggactcgacaagggggagcccgtcaacgcggcggacgcagcggccctcgagcacgacaaggcctacgaccagcagctgcaggcgggtgacaatccgtacctgcggtataaccacgccgacgccgagtttcaggagcgtctgcaagaagatacgtcttttgggggcaacctcgggcgagcagtcttccaggccaagaagcgggttctcgaacctctcggtctggttgaggaaggcgctaagacggctcctggaaagaagagaccggtagagccatcaccccagcgttctccagactcctctacgggcatcggcaagaaaggccaacagcccgccagaaaaagactcaattttggtcagactggcgactcagagtcagttccagaccctcaacctctcggagaacctccagcagcgccctctggtgtgggacctaatacaatggctgcaggcggtggcgcaccaatggcagacaataacgaaggcgccgacggagtgggtagttcctcgggaaattggcattgcgattccacatggctgggcgacagagtcatcaccaccagcacccgaacctgggccctgcccacctacaacaaccacctctacaagcaaatctccaacgggacatcgggaggagccaccaacgacaacacctacttcggctacagcaccccctgggggtattttgactttaacagattccactgccacttttcaccacgtgactggcagcgactcatcaacaacaactggggattccggcccaagagactcagcttcaagctcttcaacatccaggtcaaggaggtcacgcagaatgaaggcaccaagaccatcgccaataacctcaccagcaccatccaggtgtttacggactcggagtaccagctgccgtacgttctcggctctgcccaccagggctgcctgcctccgttcccggcggacgtgttcatgattccccagtacggctacctaacactcaacaacggtagtcaggccgtgggacgctcctccttctactgcctggaatactttccttcgcagatgctgagaaccggcaacaacttccagtttacttacaccttcgaggacgtgcctttccacagcagctacgcccacagccagagcttggaccggctgatgaatcctctgattgaccagtacctgtactacttgtctcggactcaaacaacaggaggcacggcaaatacgcagactctgggcttcagccaaggtgggcctaatacaatggccaatcaggcaaagaactggctgccaggaccctgttaccgccaacaacgcgtctcaacgacaaccgggcaaaacaacaatagcaactttgcctggactgctgggaccaaataccatctgaatggaagaaattcattggctaatcctggcatcgctatggcaacacacaaagacgacgaggagcgtttttttcccagtaacgggatcctgatttttggcaaacaaaatgctgccagagacaatgcggattacagcgatgtcatgctcaccagcgaggaagaaatcaaaaccactaaccctgtggctacagaggaatacggtatcgtggcagataacttgagttttagtcgtgcggttctttgtgatggaactgtcaacagccagggggccttacccggtatggtctggcagaaccgggacgtgtacctgcagggtcccatctgggccaagattcctcacacggacggcaacttccacccgtctccgctgatgggcggctttggcctgaaacatcctccgcctcagatcctgatcaagaacacgcctgtacctgcggatcctccgaccaccttcaaccagtcaaagctgaactctttcatcacgcaatacagcaccggacaggtcagcgtggaaattgaatgggagctgcagaaggaaaacagcaagcgctggaaccccgagatccagtacacctccaactactacaaatctacaagtgtggactttgctgttaatacagaaggcgtgtactctgaaccccgccccattggcacccgttacctcacccgtaatctg

SEQ ID NO: 129 - protein, 738 aa, Artificial Sequence
  Description of Artificial Sequence: Synthetic polypeptide
MAADGYLPDWLEDNLSEGIREWWALKPGAPKPKANQQKQDDGRGLVLPGYKYLGPFNGLDKGEPVNAADAAALEHDKAYDQQLQAGDNPYLRYNHADAEFQERLQEDTSFGGNLGRAVFQAKKRVLEPLGLVEEGAKTAPGKKRPVEPSPQRSPDSSTGIGKKGQQPARKRLNFGQTGDSESVPDPQPLGEPPAAPSGVGPNTMAAGGGAPMADNNEGADGVGSSSGNWHCDSTWLGDRVITTSTRTWALPTYNNHLYKQISNGTSGGATNDNTYFGYSTPWGYFDFNRFHCHFSPRDWQRLINNNWGFRPKRLSFKLFNIQVKEVTQNEGTKTIANNLTSTIQVFTDSEYQLPYVLGSAHQGCLPPFPADVFMIPQYGYLTLNNGSQAVGRSSFYCLEYFPSQMLRTGNNFQFTYTFEDVPFHSSYAHSQSLDRLMNPLIDQYLYYLSRTQTTGGTANTQTLGFSQGGPNTMANQAKNWLPGPCYRQQRVSTTTGQNNNSNFAWTAGTKYHLNGRNSLANPGIAMATHKDDEERFFPSNGILIFGKQNAARDNADYSDVMLTSEEEIKTTNPVATEEYGIVADNLSFSRAVLCDGTVNSQGALPGMVWQNRDVYLQGPIWAKIPHTDGNFHPSPLMGGFGLKHPPPQILIKNTPVPADPPTTFNQSKLNSFITQYSTGQVSVEIEWELQKENSKRWNPEIQYTSNYYKSTSVDFAVNTEGVYSEPRPIGTRYLTRNL

SEQ ID NO: 130 - DNA, 4385 bp, Adeno-associated virus 9
cagagagggagtggccaactccatcactaggggtaatcgcgaagcgcctcccacgctgccgcgtcagcgctgacgtagattacgtcataggggagtggtcctgtattagctgtcacgtgagtgcttttgcgacattttgcgacaccacatggccatttgaggtatatatggccgagtgagcgagcaggatctccattttgaccgcgaaatttgaacgagcagcagccatgccgggcttctacgagattgtgatcaaggtgccgagcgacctggacgagcacctgccgggcatttctgactcttttgtgaactgggtggccgagaaggaatgggagctgcccccggattctgacatggatcggaatctgatcgagcaggcacccctgaccgtggccgagaagctgcagcgcgacttcctggtccaatggcgccgcgtgagtaaggccccggaggccctcttctttgttcagttcgagaagggcgagagctactttcacctgcacgttctggtcgagaccacgggggtcaagtccatggtgctaggccgcttcctgagtcagattcgggagaagctggtccagaccatctaccgcgggatcgagccgaccctgcccaactggttcgcggtgaccaagacgcgtaatggcgccggcggggggaacaaggtggtggacgagtgctacatccccaactacctcctgcccaagactcagcccgagctgcagtgggcgtggactaacatggaggagtatataagcgcgtgcttgaacctggccgagcgcaaacggctcgtggcgcagcacctgacccacgtcagccagacgcaggagcagaacaaggagaatctgaaccccaattctgacgcgcccgtgatcaggtcaaaaacctccgcgcgctacatggagctggtcgggtggctggtggaccggggcatcacctccgagaagcagtggatccaggaggaccaggcctcgtacatctccttcaacgccgcctccaactcgcggtcccagatcaaggccgcgctggacaatgccggcaagatcatggcgctgaccaaatccgcgcccgactacctggtaggcccttcacttccggtggacattacgcagaaccgcatctaccgcatcctgcagctcaacggctacgaccctgcctacgccggctccgtctttctcggctgggcacaaaagaagttcgggaaacgcaacaccatctggctgtttgggccggccaccacgggaaagaccaacatcgcagaagccattgcccacgccgtgcccttctacggctgcgtcaactggaccaatgagaactttcccttcaacgattgcgtcgacaagatggtgatctggtgggaggagggcaagatgacggccaaggtcgtggagtccgccaaggccattctcggcggcagcaaggtgcgcgtggaccaaaagtgcaagtcgtccgcccagatcgaccccactcccgtgatcgtcacctccaacaccaacatgtgcgccgtgattgacgggaacagcaccaccttcgagcaccagcagcctctccaggaccggatgtttaagttcgaactcacccgccgtctggagcacgactttggcaaggtgacaaagcaggaagtcaaagagttcttccgctgggccagtgatcacgtgaccgaggtggcgcatgagttttacgtcagaaagggcggagccagcaaaagacccgcccccgatgacgcggataaaagcgagcccaagcgggcctgcccctcagtcgcggatccatcgacgtcagacgcggaaggagctccggtggactttgccgacaggtaccaaaacaaatgttctcgtcacgcgggcatgcttcagatgctgcttccctgcaaaacgtgcgagagaatgaatcagaatttcaacatttgcttcacacacggggtcagagactgctcagagtgtttccccggcgtgtcagaatctcaaccggtcgtcagaaagaggacgtatcggaaactctgtgcgattcatcatctgctggggcgggctcccgagattgcttgctcggcctgcgatctggtcaacgtggacctggatgactgtgtttctgagcaataaatgacttaaaccaggtatggctgccgatggttatcttccagattggctcgaggacaacctctctgagggcattcgcgagtggtgggcgctgaaacctggagccccgaagcccaaagccaaccagcaaaagcaggacgacggccggggtctggtgcttcctggctacaagtacctcggacccttcaacggactcgacaagggggagcccgtcaacgcggcggacgcagcggccctcgagcacggcaaggcctacgaccagcagctgcaggcgggtgacaatccgtacctgcggtataaccacgccgacgccgagtttcaggagcgtctgcaagaagatacgtcttttgggggcaacctcgggcgagcagtcttccaggccaagaagcgggttctcgaacctctcggtctggttgaggaaggcgctaagacggctcctggaaagaagagaccggtagagccatcaccccagcgttctccagactcctctacgggcatcggcaagaaaggccaacagcccgccagaaaaagactcaattttggtcagactggcgactcagagtcagttccagaccctcaacctctcggagaacctccagcagcgccctctggtgtgggacctaatacaatggctgcaggcggtggcgcaccaatggcagacaataacgaaggcgccgacggagtgggtaattcctcgggaaattggcattgcgattccacatggctgggggacagagtcatcaccaccagcacccgaacctgggcattgcccacctacaacaaccacctctacaagcaaatctccaatggaacatcgggaggaagcaccaacgacaacacctactttggctacagcaccccctgggggtattttgacttcaacagattccactgccacttctcaccacgtgactggcagcgactcatcaacaacaactggggattccggccaaagagactcaacttcaagctgttcaacatccaggtcaaggaggttacgacgaacgaaggcaccaagaccatcgccaataaccttaccagcaccgtccaggtctttacggactcggagtaccagctaccgtacgtcctaggctctgcccaccaaggatgcctgccaccgtttcctgcagacgtcttcatggttcctcagtacggctacctgacgctcaacaatggaagtcaagcgttaggacgttcttctttctactgtctggaatacttcccttctcagatgctgagaaccggcaacaactttcagttcagctacactttcgaggacgtgcctttccacagcagctacgcacacagccagagtctagatcgactgatgaaccccctcatcgaccagtacctatactacctggtcagaacacagacaactggaactgggggaactcaaactttggcattcagccaagcaggccctagctcaatggccaatcaggctagaaactgggtacccgggccttgctaccgtcagcagcgcgtctccacaaccaccaaccaaaataacaacagcaactttgcgtggacgggagctgctaaattcaagctgaacgggagagactcgctaatgaatcctggcgtggctatggcatcgcacaaagacgacgaggaccgcttctttccatcaagtggcgttctcatatttggcaagcaaggagccgggaacgatggagtcgactacagccaggtgctgattacagatgaggaagaaattaaagccaccaaccctgtagccacagaggaatacggagcagtggccatcaacaaccaggccgctaacacgcaggcgcaaactggacttgtgcataaccagggagttattcctggtatggtctggcagaaccgggacgtgtacctgcagggccctatttgggctaaaatacctcacacagatggcaactttcacccgtctcctctgatgggtggatttggactgaaacacccacctccacagattctaattaaaaatacaccagtgccggcagatcctcctcttaccttcaatcaagccaagctgaactctttcatcacgcagtacagcacgggacaagtcagcgtggaaatcgagtgggagctgcagaaagaaaacagcaagcgctggaatccagagatccagtatacttcaaactactacaaatctacaaatgtggactttgctgtcaataccaaaggtgtttactctgagcctcgccccattggtactcgttacctcacccgtaatttgtaattgcctgttaatcaataaaccggttaattcgtttcagttgaactttggtctctgcg

SEQ ID NO: 131 - DNA, 4382 bp, Adeno-associated virus 9
cagagagggagtggccaactccatcactaggggtaatcgcgaagcgcctcccacgctgccgcgtcagcgctgacgtagattacgtcataggggagtggtcctgtattagctgtcacgtgagtgcttttgcgacattttgcgacaccacatggccatttgaggtatatatggccgagtgagcgagcaggatctccattttgaccgcgaaatttgaacgagcagcagccatgccgggcttctacgagattgtgatcaaggtgccgagcgacctggacgagcacctgccgggcatttctgactcttttgtgaactgggtggccgagaaggaatgggagctgcccccggattctgacatggatcggaatctgatcgagcaggcacccctgaccgtggccgagaagctgtagcgcgacttcctggtccaatggcgccgcgtgagtaaggccccggaggccctcttctttgttcagttcgagaagggcgagagctactttcacctgcacgttctggtcgagaccacgggggtcaagtccatggtgctaggccgcttcctgagtcagattcgggagaagctggtccagaccatctaccgcgggatcgagccgaccctgcccaactggttcgcggtgaccaagacgcgtaatggcgccggcggggggaacaaggtggtggacgagtgctacatccccaactacctcctgcccaagactcagcccgagctgcagtgggcgtggactaacatggaggagtatataagcgcgtgcttgaacctggccgagcgcaaacggctcgtggcgcagcacctgacccacgtcagccagacgcaggagcagaacaaggagaatctgaaccccaattctgacgcgcccgtgatcaggtcaaaaacctccgcgcgctacatggagctggtcgggtggctggtggaccggggcatcacctccgagaagcagtggatccaggaggaccaggcctcgtacatctccttcaacgccgcctccaactcgcggtcccagatcaaggccgcgctggacaatgccggcaagatcatggcgctgaccaaatccgcgcccgactacctggtaggcccttcacttccggtggacattacgcagaaccgcatctaccgcatcctgcagctcaacggctacgaccctgcctacgccggctccgtctttctcggctgggcacaaaagaagttcgggaaacgcaacaccatctggctgtttgggccggccaccacgggaaagaccaacatcgcagaagccattgcccacgccgtgcccttctacggctgcgtcaactggaccaatgagaactttcccttcaacgattgcgtcgacaagatggtgatctggtgggaggagggcaagatgacggccaaggtcgtggagtccgccaaggccattctcggcggcagcaaggtgcgcgtggaccaaaagtgcaagtcgtccgcccagatcgaccccactcccgtgatcgtcacctccaacaccaacatgtgcgccgtgattgacgggaacagcaccaccttcgagcaccagcagcctctccaggaccggatgtttaagttcgaactcacccgccgtctggagcacgactttggcaaggtgacaaagcaggaagtcaaagagttcttccgctgggccagtgatcacgtgaccgaggtggcgcatgagttttacgtcagaaagggcggagccagcaaaagacccgcccccgatgacgcggataaaagcgagcccaagcgggcctgcccctcagtcgcggatccatcgacgtcagacgcggaaggagctccggtggactttgccgacaggtaccaaaacaaatgttctcgtcacgcgggcatgcttcagatgctgcttccctgcaaaacgtgcgagagaatgaatcagaatttcaacatttgcttcacacacggggtcagagactgctcagagtgtttccccggcgtgtcagaatctcaaccggtcgtcagaaagaggacgtatcggaaactctgtgcgattcatcatctgctggggcgggctcccgagattgcttgctcggcctgcgatctggtcaacgtggacctggatgactgtgtttctgagcaataaatgacttaaaccaggtatggctgccgatggttatcttccagattggctcgaggacaacctctctgagggcattcgcgagtggtgggacctgaaacctggagccccgaaacccaaagccaaccagcaaaagcaggacgacggccggggtctggtgcttcctggctacaagtacctcggacccttcaacggactcgacaagggggagcccgtcaacgcggcggacgcagcggccctcgagcacgacaaggcctacgaccagcagctcaaagcgggtgacaatccgtacctgcggtataaccacgccgacgccgagtttcaggagcgtctgcaagaagatacgtcttttgggggcaacctcgggcgagcagtcttccaggccaagaagcgggttctcgaacctctcggtctggttgaggaaggcgctaagacggctcctggaaagaagagaccggtagagcagtcaccccaagaaccagactcatcctcgggcatcggcaaatcaggccagcagcccgctaaaaagagactcaattttggtcagactggcgactcagagtcagtccccgacccacaacctctcggagaacctccagaagccccctcaggtctgggacctaatacaatggcttcaggcggtggcgctccaatggcagacaataacgaaggcgccgacggagtgggtaattcctcgggaaattggcattgcgattccacatggctgggggacagagtcatcaccaccagcacccgaacctgggcattgcccacctacaacaaccacctctacaagcaaatctccaatggaacatcgggaggaagcaccaacgacaacacctactttggctacagcaccccctgggggtattttgacttcaacagattccactgccacttctcaccacgtgactggcagcgactcatcaacaacaactggggattccggccaaagagactcaacttcaagctgttcaacatccaggtcaaggaggttacgacgaacgaaggcaccaagaccatcgccaataaccttaccagcaccgtccaggtctttacggactcggagtaccagctaccgtacgtcctaggctctgcccaccaaggatgcctgccaccgtttcctgcagacgtcttcatggttcctcagtacggctacctgacgctcaacaatggaagtcaagcgttaggacgttcttctttctactgtctggaatacttcccttctcagatgctgagaaccggcaacaactttcagttcagctacactttcgaggacgtgcctttccacagcagctacgcacacagccagagtctagatcgactgatgaaccccctcatcgaccagtacctatactacctggtcagaacacagacaactggaactgggggaactcaaactttggcattcagccaagcaggccctagctcaatggccaatcaggctagaaactgggtacccgggccttgctaccgtcagcagcgcgtctccacaaccaccaaccaaaataacaacagcaactttgcgtggacgggagctgctaaattcaagctgaacgggagagactcgctaatgaatcctggcgtggctatggcatcgcacaaagacgacgaggaccgcttctttccatcaagtggcgttctcatatttggcaagcaaggagccgggaacgatggagtcgactacagccaggtgctgattacagatgaggaagaaattaaagccaccaaccctgtagccacagaggaatacggagcagtggccatcaacaaccaggccgctaacacgcaggcgcaaactggacttgtgcataaccagggagttattcctggtatggtctggcagaaccgggacgtgtacctgcagggccctatttgggctaaaatacctcacacagatggcaactttcacccgtctcctctgatgggtggatttggactgaaacacccacctccacagattctaattaaaaatacaccagtgccggcagatcctcctcttaccttcaatcaagccaagctgaactctttcatcacgcagtacagcacgggacaagtcagcgtggaaatcgagtgggagctgcagaaagaaaacagcaagcgctggaatccagagatccagtatacttcaaactactacaaatctacaaatgtggactttgctgtcaataccgaaggtgtttactctgagcctcgccccattggtactcgttacctcacccgtaatttgtaattgcctgttaatcaataaaccggttaattcgtttcagttgaactttggtctctgcg

SEQ ID NO: 132 - protein, 736 aa, Adeno-associated virus 9
MAADGYLPDWLEDNLSEGIREWWALKPGAPQPKANQQHQDNARGLVLPGYKYLGPGNGLDKGEPVNAADAAALEHDKAYDQQLKAGDNPYLKYNHADAEFQERLKEDTSFGGNLGRAVFQAKKRLLEPLGLVEEAAKTAPGKKRPVEQSPQEPDSSAGIGKSGAQPAKKRLNFGQTGDTESVPDPQPIGEPPAAPSGVGSLTMASGGGAPVADNNEGADGVGSSSGNWHCDSQWLGDRVITTSTRTWALPTYNNHLYKQISNSTSGGSSNDNAYFGYSTPWGYFDFNRFHCHFSPRDWQRLINNNWGFRPKRLNFKLFNIQVKEVTDNNGVKTIANNLTSTVQVFTDSDYQLPYVLGSAHEGCLPPFPADVFMIPQYGYLTLNDGSQAVGRSSFYCLEYFPSQMLRTGNNFQFSYEFENVPFHSSYAHSQSLDRLMNPLIDQYLYYLSKTINGSGQNQQTLKFSVAGPSNMAVQGRNYIPGPSYRQQRVSTTVTQNNNSEFAWPGASSWALNGRNSLMNPGPAMASHKEGEDRFFPLSGSLIFGKQGTGRDNVDADKVMITNEEEIKTTNPVATESYGQVATNHQSAQAQAQTGWVQNQGILPGMVWQDRDVYLQGPIWAKIPHTDGNFHPSPLMGGFGMKHPPPQILIKNTPVPADPPTAFNKDKLNSFITQYSTGQVSVEIEWELQKENSKRWNPEIQYTSNYYKSNNVEFAVNTEGVYSEPRPIGTRYLTRNL

SEQ ID NO: 133 - protein, 736 aa, Adeno-associated virus 9
MAADGYLPDWLEDNLSEGIREWWDLKPGAPKPKANQQKQDDGRGLVLPGYKYLGPFNGLDKGEPVNAADAAALEHDKAYDQQLKAGDNPYLRYNHADAEFQERLQEDTSFGGNLGRAVFQAKKRVLEPLGLVEEGAKTAPGKKRPVEQSPQEPDSSSGIGKSGQQPAKKRLNFGQTGDSESVPDPQPLGEPPEAPSGLGPNTMASGGGAPMADNNEGADGVGNSSGNWHCDSTWLGDRVITTSTRTWALPTYNNHLYKQISNGTSGGSTNDNTYFGYSTPWGYFDFNRFHCHFSPRDWQRLINNNWGFRPKRLNFKLFNIQVKEVTTNEGTKTIANNLTSTVQVFTDSEYQLPYVLGSAHQGCLPPFPADVFMVPQYGYLTLNNGSQALGRSSFYCLEYFPSQMLRTGNNFQFSYTFEDVPFHSSYAHSQSLDRLMNPLIDQYLYYLVRTQTTGTGGTQTLAFSQAGPSSMANQARNWVPGPCYRQQRVSTTTNQNNNSNFAWTGAAKFKLNGRDSLMNPGVAMASHKDDEDRFFPSSGVLIFGKQGAGNDGVDYSQVLITDEEEIKATNPVATEEYGAVAINNQAANTQAQTGLVHNQGVIPGMVWQNRDVYLQGPIWAKIPHTDGNFHPSPLMGGFGLKHPPPQILIKNTPVPADPPLTFNQAKLNSFITQYSTGQVSVEIEWELQKENSKRWNPEIQYTSNYYKSTNVDFAVNTEGVYSEPRPIGTRYLTRNL

SEQ ID NO: 134 - protein, 623 aa, Adeno-associated virus 9
MPGFYEIVIKVPSDLDEHLPGISDSFVNWVAEKEWELPPDSDMDRNLIEQAPLTVAEKLQRDFLVQWRRVSKAPEALFFVQFEKGESYFHLHVLVETTGVKSMVLGRFLSQIREKLVQTIYRGIEPTLPNWFAVTKTRNGAGGGNKVVDECYIPNYLLPKTQPELQWAWTNMEEYISACLNLAERKRLVAQHLTHVSQTQEQNKENLNPNSDAPVIRSKTSARYMELVGWLVDRGITSEKQWIQEDQASYISFNAASNSRSQIKAALDNAGKIMALTKSAPDYLVGPSLPVDITQNRIYRILQLNGYDPAYAGSVFLGWAQKKFGKRNTIWLFGPATTGKTNIAEAIAHAVPFYGCVNWTNENFPFNDCVDKMVIWWEEGKMTAKVVESAKAILGGSKVRVDQKCKSSAQIDPTPVIVTSNTNMCAVIDGNSTTFEHQQPLQDRMFKFELTRRLEHDFGKVTKQEVKEFFRWASDHVTEVAHEFYVRKGGASKRPAPDDADKSEPKRACPSVADPSTSDAEGAPVDFADRYQNKCSRHAGMLQMLLPCKTCERMNQNFNICFTHGVRDCSECFPGVSESQPVVRKRTYRKLCAIHHLLGRAPEIACSACDLVNVDLDDCVSEQ

SEQ ID NO: 135 - DNA, 2211 bp, Artificial Sequence
  Description of Artificial Sequence: Synthetic polynucleotide
atggctgccgatggttatcttccagattggctcgaggacaaccttagtgaaggaattcgcgagtggtgggctttgaaacctggagcccctcaacccaaggcaaatcaacaacatcaagacaacgctcgaggtcttgtgcttccgggttacaaataccttggacccggcaacggactcgacaagggggagccggtcaacgcagcagacgcggcggccctcgagcacgacaaggcctacgaccagcagctcaaggccggagacaacccgtacctcaagtacaaccacgccgacgccgagttccaggagcggctcaaagaagatacgtcttttgggggcaacctcgggcgagcagtcttccaggccaaaaagaggcttcttgaacctcttggtctggttgaggaagcggctaagacggctcctggaaagaagaggcctgtagagcagtctcctcaggaaccggactcctccgcgggtattggcaaatcgggtgcacagcccgctaaaaagagactcaatttcggtcagactggcgacacagagtcagtcccagaccctcaaccaatcggagaacctcccgcagccccctcaggtgtgggatctcttacaatggcttcaggtggtggcgcaccagtggcagacaataacgaaggtgccgatggagtgggtagttcctcgggaaattggcattgcgattcccaatggctgggggacagagtcatcaccaccagcacccgaacctgggccctgcccacctacaacaatcacctctacaagcaaatctccaacagcacatctggaggatcttcaaatgacaacgcctacttcggctacagcaccccctgggggtattttgacttcaacagattccactgccacttctcaccacgtgactggcagcgactcatcaacaacaactggggattccggcctaagcgactcaacttcaagctcttcaacattcaggtcaaagaggttacggacaacaatggagtcaagaccatcgccaataaccttaccagcacggtccaggtcttcacggactcagactatcagctcccgtacgtgctcgggtcggctcacgagggctgcctcccgccgttcccagcggacgttttcatgattcctcagtacgggtatctgacgcttaatgatggaagccaggccgtgggtcgttcgtccttttactgcctggaatatttcccgtcgcaaatgctaagaacgggtaacaacttccagttcagctacgagtttgagaacgtacctttccatagcagctacgctcacagccaaagcctggaccgactaatgaatccactcatcgaccaatacttgtactatctctcaaagactattaacggttctggacagaatcaacaaacgctaaaattcagtgtggccggacccagcaacatggctgtccagggaagaaactacatacctggacccagctaccgacaacaacgtgtctcaaccactgtgactcaaaacaacaacagcgaatttgcttggcctggagcttcttcttgggctctcaatggacgtaatagcttgatgaatcctggacctgctatggccagccacaaagaaggagaggaccgtttctttcctttgtctggatctttaatttttggcaaacaaggaactggaagagacaacgtggatgcggacaaagtcatgataaccaacgaagaagaaattaaaactactaacccggtagcaacggagtcctatggacaagtggccacaaaccaccagagtgcccaagcacaggcgcagaccggctgggttcaaaaccaaggaatacttccgggtatggtttggcaggacagagatgtgtacctgcaaggacccatttgggccaaaattcctcacacggacggcaactttcacccttctccgctgatgggagggtttggaatgaagcacccgcctcctcagatcctcatcaaaaacacacctgtacctgcggatcctccaacggccttcaacaaggacaagctgaactctttcatcacccagtattctactggccaagtcagcgtggagatcgagtgggagctgcagaaggaaaacagcaagcgctggaacccggagatccagtacacttccaactattacaagtctaataatgttgaatttgctgttaatactgaaggtgtatatagtgaaccccgccccattggcaccagatacctgactcgtaatctgtaa

SEQ ID NO: 136 - protein, 736 aa, Artificial Sequence; identical to SEQ ID NO: 132
  Description of Artificial Sequence: Synthetic polypeptide

SEQ ID NO: 137 - DNA, 2460 bp, Artificial Sequence
  Description of Artificial Sequence: Synthetic polynucleotide
ggtaattcctccggaaattggcattgcgattccacatggctgggcgaccgagtcattaccaccagcacccggacttgggccctgcccacctacaacaaccacctctacaagcaaatctccagccaatcgggtgccaccaacgacaaccactacttcggctacagcaccccttgggggtattttgatttcaacagattccactgccatttctcaccacgtgactggcagcgactcatcaacaacaactggggattcatggctgccgatggttatcttccagattggctcgaggacactctctctgaaggaatcagacagtggtggaagctcaaacctggcccaccaccgccgaaacctaaccaacaacaccgggacgacagtaggggtcttgtgcttcctgggtacaagtacctcggacccttcaacggactcgacaaaggagagccggtcaacgaggcagacgccgcggccctcgagcacgacaaagcctacgaccaccagctcaagcaaggggacaacccgtacctcaaatacaaccacgcggacgctgaatttcaggagcgtcttcaagaagatacgtctttcgggggcaacctcgggcgagcagtcttccaggccaaaaagagggtactcgagcctcttggtctggttgaggaagctgttaagacggctcctggaaaaaagagacctatagagcagtctcctgcagaaccggactcttcctcgggcatcggcaaatcaggccagcagcccgctaagaaaagactcaattttggtcagactggcgacacagagtcagtcccagaccctcaaccaatcggagaaccccccgcagccccctctggtgtgggatctaatacaatggcttcaggcggtggggcaccaatggcagacaataacgaaggcgccgacggagtgggtaattcctcgggaaattggcattgcgattccacatggatgggcgacagagttatcaccaccagcacaagaacctgggccctccccacctacaataatcacctctacaagcaaatctccagcgaatcgggagccaccaacgacaaccactacttcggctacagcaccccctgggggtattttgactttaacagattccactgtcacttctcaccacgtgactggcagcgactcatcaacaacaactggggatttagacccaagaaactcaatttcaagctcttcaacatccaagtcaaggaggtcacgcagaatgatggaaccacgaccatcgccaataaccttaccagcacggtgcaggtcttcacagactctgagtaccagctgccctacgtcctcggttcggctcaccagggctgccttccgccgttcccagcagacgtcttcatgattcctcagtacggctacttgactctgaacaatggcagccaagcggtaggacgttcttcattctactgtctagagtattttccctctcagatgctgaggacgggaaacaacttcaccttcagctacacttttgaagacgtgcctttccacagcagctacgcgcacagccagagtctggatcggctgatgaatcctctcattgaccagtacctgtattacctgagcaaaactcagggtacaagtggaacaacgcagcaatcgagactgcagttcagccaagctgggcctagctccatggctcagcaggccaaaaactggctaccgggacccagctaccgacagcagcgaatgtctaagacggctaatgacaacaacaacagtgaatttgcttggactgcagccaccaaatattacctgaatggaagaaattctctggtcaatcccgggcccccaatggccagtcacaaggacgatgaggaaaagtatttccccatgcacggaaatctcatctttggaaaacaaggcacaggaactaccaatgtggacattgaatcagtgcttattacagacgaagaagaaatcagaacaactaatcctgtggctacagaacaatacggacaggttgccaccaaccatcagagtcagaacaccacagcttcctatggaagtgtggacagccagggaatcttacctggaatggtgtggcaggaccgcgatgtctatcttcaaggtcccatttgggccaaaactcctcacacggacggacactttcatccttctccgctcatgggaggctttggactgaaacaccctcctccccagatcctgatcaaaaacacacctgtgccagcgaatcccgcgaccactttcactcctggaaagtttgcttcgttcattacccagtattccaccggacaggtcagcgtggaaatagagtgggagctgcagaaagaaaacagcaaacgctggaacccagaaattcagtacacctccaactacaacaagtcggtgaatgtggagtttaccgtggacgcaaacggtgtttattctgaaccccgccctattggcactcgttaccttacccggaacttg

SEQ ID NO: 138 - DNA, 3123 bp, Artificial Sequence
  Description of Artificial Sequence: Synthetic polynucleotide
gaattcgccctttctacggctgcgtcaactggaccaatgaaaactttcccttcaacgattgcgtcgacaagatggtgatctggtgggaggagggaaagatgaccgccaaggtcgtggaatctgccaaagccattctgggtggaggcaaggttcgtgtggaccagaaatgcaagtcttcggcccagatcgacccgactccggtgattgtcacctctaacaccaacatgtgcgccgtgattgacggaaactcgaccaccttcgagcaccagcagccgttgcaagaccggatgttcaaatttgaacttacccgccgtttggatcatgactttgggaaggtcaccaagcaggaagtcaaagactttttccggtgggctcaagatcacgtgactgaggtggagcatgagttctacgtcaaaaagggtggagccaagaaaaggcccgcccccgatgatgtatatataaatgagcccaagcgggcgcgcgagtcagttgcgcagccatcgacgtcagacgcggaagcttcgataaactacgcggacaggtaccaaaacaaatgttctcgtcacgtgggcatgaatctgatgctgtttccctgtcgacaatgcgaaagaatgaatcagaattcaaatatctgcttcacacacgggcaaaaagactgtttggaatgctttcccgtgtcagaatctcaacccgtttctgtcgtcagaaaaacgtatcagaaactttgttacattcatcatatcatgggaaaagtaccagacgcctgcactgcctgcgacctggtaaatgtggacttggatgactgtatttctgagcaataaatgacttaaatcaggtatggctgctgacggttatcttccagattggctcgaggacactctctctgaaggaatcagacagtggtggaagctcaaacctggcccaccaccgccgaaacctaaccaacaacaccgggacgacagtaggggtcttgtgcttcctgggtacaagtacctcggacccttcaacggactcgacaaaggagagccggtcaacgaggcagacgccgcggccctcgagcacgacaaagcctacgaccaccagctcaagcaaggggacaacccgtacctcaaatacaaccacgcggacgctgaatttcaggagcgtcttcaagaagatacgtctttcgggggcaacctcgggcgagcagtcttccaggccaaaaagagggtactcgagcctcttggtctggttgaggaagctgttaagacggctcctggaaaaaagagacctatagagcagtctcctgcagaaccggactcttcctcgggcatcggcaaatcaggccagcagcccgctaagaaaagactcaattttggtcagactggcgacacagagtcagtcccaggccctcaaccaatcggagaaccccccgcagccccctctggtgtgggatctaatacaatggcttcaggcggtggggcaccaatggcagacaataacgaaggcgccgacggagtgggtaattcctcgggaaattggcattgcgattccacatggatgggcgacagagttatcaccaccagcacaagaacctgggccctccccacctacaataatcacctctacaagcaaatctccagcgaatcgggagccaccaacgacaaccactacttcggctacagcaccccctgggggtattttgactttaacagattccactgtcacttctcaccacgtgactggcagcgactcatcaacaacaactggggatttagacccaagaaactcaatttcaagctcttcaacatccaagtcaaggaggtcacgcagaatgatggaaccacgaccatcgccaataaccttaccagcgcggtgcaggtcttcacagactctgagtaccagctgccctacgtcctcggttcggctcaccagggctgccttccgccgttcccagcagacgtcttcatgattcctcagtacggctacttgactctgaacaatggcagccaagcggtaggacgttcttcattctactgtctagagtattttccctctcagatgctgaggacgggaaacaacttcaccttcagctacacttttgaagacgtgcctttccacagcagctacgcgcacagccagagtctggatcggctgatgaatcctctcattgaccagtacctgtattacctgagcaaaactcagggtacaagtggaacaacgcagcaatcgagactgcagttcagccaagctgggcctagctccatggctcagcaggccaaaaactggctaccgggacccagctaccgacagcagcgaatgtctaagacggctaatgacaacaacaacagtgaatttgcttggactgcagccaccaaatattacctgaatggaagaaattctctggtcaatcccgggcccccagtggccagtcacaaggacgatgaggaaaagtatttccccatgcacggaaatctcatctttggaaaacaaggcacaggaactaccaatgtggacattgaatcagtgcttattacagacgaagaagaaatcagaacaactaatcctgtggctacagaacaatacggacaggttgccaccaaccatcagagtcagaacaccacagcttcctatggaagtgtggacagccagggaatcttacctggaatggtgtggcaggaccgcgatgtctatcttcaaggtcccatttgggccaaaactcctcacacggacggacactttcatccttctccgctcatgggaggctttggactgaaacaccctcctccccagatcctgatcaaaaacacacctgtgccagcgaatcccgcgaccactttcactcctggaaagtttgcttcgttcattacccagtattccacctgacaggtcagcgtggaaatagagtgggagctgcagaaagaaaacagcaaacgctggaacccagaaattcagtacacctccaactacaacaagtcggtgaatgtggagtttaccgtggacgcaaacggtgtttattctgaaccccgccctattggcactcgttaccttacccggaacttgtaatttcctgttaatgaataagccgatttatgcgtttcagttgaactttggtctctgcgaagggcgaattcgtttaaacct

SEQ ID NO: 139 - protein, 735 aa, Artificial Sequence
  Description of Artificial Sequence: Synthetic polypeptide
MAADGYLPDWLEDTLSEGIRQWWKLKPGPPPPKPNQQHRDDSRGLVLPGYKYLGPFNGLDKGEPVNEADAAALEHDKAYDHQLKQGDNPYLKYNHADAEFQERLQEDTSFGGNLGRAVFQAKKRVLEPLGLVEEAVKTAPGKKRPIEQSPAEPDSSSGIGKSGQQPAKKRLNFGQTGDTESVPGPQPIGEPPAAPSGVGSNTMASGGGAPMADNNEGADGVGNSSGNWHCDSTWMGDRVITTSTRTWALPTYNNHLYKQISSESGATNDNHYFGYSTPWGYFDFNRFHCHFSPRDWQRLINNNWGFRPKKLNFKLFNIQVKEVTQNDGTTTIANNLTSAVQVFTDSEYQLPYVLGSAHQGCLPPFPADVFMIPQYGYLTLNNGSQAVGRSSFYCLEYFPSQMLRTGNNFTFSYTFEDVPFHSSYAHSQSLDRLMNPLIDQYLYYLSKTQGTSGTTQQSRLQFSQAGPSSMAQQAKNWLPGPSYRQQRMSKTANDNNNSEFAWTAATKYYLNGRNSLVNPGPPVASHKDDEEKYFPMHGNLIFGKQGTGTTNVDIESVLITDEEEIRTTNPVATEQYGQVATNHQSQNTTASYGSVDSQGILPGMVWQDRDVYLQGPIWAKTPHTDGHFHPSPLMGGFGLKHPPPQILIKNTPVPANPATTFTPGKFASFITQYSTGQVSVEIEWELQKENSKRWNPEIQYTSNYNKSVNVEFTVDANGVYSEPRPIGTRYLTRNL

SEQ ID NO: 140 - DNA, 3123 bp, Artificial Sequence
  Description of Artificial Sequence: Synthetic polynucleotide
gaattcgccctttctacggctgcgtcaactggaccaatgaaaactttcccttcaacgattgcgtcgacaagatggtgatctggtgggaggagggaaagatgaccgccaaggtcgtggaatctgccaaagccattctgggtggaagcaaggttcgtgtggaccagaaatgcaagtcttcggcccagatcgacccgactccggtgattgtcacctctaacaccaacatgtgcgccgtgattgacggaaactcgaccaccttcgagcaccagcagccgttgcaagaccggatgttcaaatttgaacttacccgccgtttggatcatgactttgggaaggtcaccaagcaggaagtcaaagactttttccggtgggctcaagatcacgtgactgaggtggagcatgagttctacgtcaaaaagggtggagccaagaaaaggcccgcccccgatgatgtatatataaatgagcccaagcgggcgcgcgagtcagttgcgcagccatcgacgtcagacgcggaagcttcgataaactacgcgggcaggtaccaaaacaaatgttctcgtcacgtgggcatgaatctgatgctgtttccctgtcgacaatgcgaaagaatgaatcagaattcaaatatctgcttcacacacgggcaaaaagactgtttggaatgctttcccgtgtcagaatctcaacccgtttctgtcgtcagaaaaacgtatcagaaactttgttacattcatcatatcatgggaaaagaaccagacgcctgcactgcctgcgacctggtaaatgtggacttggatgactgtatttctgagcaataaatgacttaaatcaggtatggctgctgacggttatcttccagattggctcgaggacactctctctgaaggaatcagacagtggtggaagctcaaacctggcccaccaccgccgaaacctaaccaacaacaccgggacgacagtaggggtcttgtgcttcctgggtacaagtacctcggacccttcaacggactcgacaaaggagagccggtcaacgaggcagacgccgcggccctcgagcacgacaaagcctacgaccaccagctcaagcaaggggacaacccgtacctcaaatacaaccacgcggacgctgaatttcaggagcgtcttcaagaagatacgtctttcgggggcaacctcgggcgagcagtcttccaggccaaaaagagggtactcgagcctcttggtctggttgaggaagctgttaagacggctcctggaaaaaagagacctatagagcagtctcctgcagaaccggactcttcctcgggcatcggcgaatcaggccagcagcccgctaagaaaagactcaattttggtcagactggcgacacagagtcagtcccagaccctcaaccaatcggagaaccccccgcagccccctctggtgtgggatctaatacaatggcttcaggcggtggggcaccaatggcagacgataacgaaggcgccgacggagtgggtaattcctcgggaaattggcattgcgattccacatggatgggcgacagagttatcaccaccagcacaagaacctgggccctccccacctacaataatcacctctacaagcaaatctccagcgaatcgggagccaccaacgacaaccactacttcggctacagcaccccctgggggtattttgactttaacagattccactgtcacttctcaccacgtgactggcagcgactcatcaacaacaactggggatttagacccaagaaactcaatttcaagctcttcaacatccaagtcaaggaggtcacgcagaatgatggaaccacgaccatcgccaataaccttaccagcacggtgcaggtcttcacagactctgagtaccagctgccctacgtcctcggttcggctcaccagggctgccttccgccgttcccagcagacgtcttcatgattcctcagtacggctacttgactctgaacaatggcagccaagcggtaggacgttcttcattctactgtctagagtattttccctctcagatgctgaggacgggaaacaacttcaccttcagctacacttttgaagacgtgcctttccacagcagctacgcgcacagccagagtctggatcggctgatgaatcctctcattgaccagtacctgtattacctgagcaaaactcagggtacaagtggaacaacgcagcaatcgagactgcagttcagccaagctgggcctagctccatggctcagcaggccaaaaactggctaccgggacccagctaccgacagcagcgaatgtctaagacggctaatgacaacaacaacagtgaatttgcttggactgcagccaccaaatattacctgaatggaagaaattctctggtcaatcccgggcccccaatggccagtcacaaggacgatgaggaaaagtatttccccatgcacggaaatctcatctttggaaaacaaggcacaggaactaccaatgtggacattgaatcagtgcttattacagacgaagaagaaatcagaacaactaatcctgtggctacagaacaatacggacaggttgccaccaaccatcagagtcaggacaccacagcttcctatggaagtgtggacagccagggaatcttacctggaatggtgtggcaggaccgcgatgtctatcttcaaggtcccatttgggccaaaactcctcacacggacggacactttcatccttctccgctcatgggaggctttggactgaaacaccctcctccccagatcctgatcaaaaacacacctgtgccagcgaatcccgcgaccactttcactcctggaaagtttgcttcgttcattacccagtattccaccggacaggtcagcgtggaaatagagtgggagctgcagaaagaaaacagcaaacgctggaacccagaaattcagtacacctccaactacaacaagtcggtgaatgtggagtttaccgtggacgcaaacggtgtttattctgaaccccgccctattggcactcgttaccttacccggaacttgtaatttcctgttaatgaataaaccgatttatgcgtttcagttgaactttggtctctgcgaagggcgaattcgcggccgcta

SEQ ID NO: 141 - protein, 735 aa, Artificial Sequence
  Description of Artificial Sequence: Synthetic polypeptide
MAADGYLPDWLEDTLSEGIRQWWKLKPGPPPPKPNQQHRDDSRGLVLPGYKYLGPFNGLDKGEPVNEADAAALEHDKAYDHQLKQGDNPYLKYNHADAEFQERLQEDTSFGGNLGRAVFQAKKRVLEPLGLVEEAVKTAPGKKRPIEQSPAEPDSSSGIGESGQQPAKKRLNFGQTGDTESVPDPQPIGEPPAAPSGVGSNTMASGGGAPMADDNEGADGVGNSSGNWHCDSTWMGDRVITTSTRTWALPTYNNHLYKQISSESGATNDNHYFGYSTPWGYFDFNRFHCHFSPRDWQRLINNNWGFRPKKLNFKLFNIQVKEVTQNDGTTTIANNLTSTVQVFTDSEYQLPYVLGSAHQGCLPPFPADVFMIPQYGYLTLNNGSQAVGRSSFYCLEYFPSQMLRTGNNFTFSYTFEDVPFHSSYAHSQSLDRLMNPLIDQYLYYLSKTQGTSGTTQQSRLQFSQAGPSSMAQQAKNWLPGPSYRQQRMSKTANDNNNSEFAWTAATKYYLNGRNSLVNPGPPMASHKDDEEKYFPMHGNLIFGKQGTGTTNVDIESVLITDEEEIRTTNPVATEQYGQVATNHQSQDTTASYGSVDSQGILPGMVWQDRDVYLQGPIWAKTPHTDGHFHPSPLMGGFGLKHPPPQILIKNTPVPANPATTFTPGKFASFITQYSTGQVSVEIEWELQKENSKRWNPEIQYTSNYNKSVNVEFTVDANGVYSEPRPIGTRYLTRNL

SEQ ID NO: 142 - DNA, 3113 bp, Artificial Sequence
  Description of Artificial Sequence: Synthetic polynucleotide
gaattcgccctttctacggctgcgtcaactggaccaatgaaaactttcccttcaacgattgcgtcgacaagatggtgatctggtgggaggagggaaagatgaccgccaaggtcgtggaatctgccaaagccattctgggtggaagcaaggttcgtgtggaccagaaatgcaagtcttcggcccagatcgacccgactccggtgattgtcacctctaacaccaacatgtgcgccgtgattgacggaaactcgaccaccttcgagcaccagcagccgttgcaagaccggatgttcaaatttgaacttacccgccgtttggatcatgactttgggaaggtcaccaagcaggaagtcaaagactttttccggtgggctcaagatcacgtgactgaggtggagcatgagttctacgtcaaaaagggtggagccaagaaaaggcccgcccccgatgatgtatatataaatgagcccaagcgggcgcgcgagtcagttgcgcagccatcgacgtcagacgcggaagcttcgataaactacgcggacaggtaccaaaacaaatgttctcgtcacgtgggcatgaatctgatgctgtttccctgtcgacaatgcgaaagaatgaatcagaattcaaatatctgcttcacacacgggcaaaaagactgtttggaatgctttcccgtgtcagaatctcaacccgttcctgtcgtcagaaaaacgtatcagaaactttgttacattcatcatatcatgggaaaagtaccagacgcctgcactgcctgcgacctggtaaatgtggacttggatgactgtatttctgagcaataaatgacttaaatcaggtatggctgctgacggttatcttccagattggctcgaggacactctctctgaaggaatcagacagtggtggaagctcaaacctggcccaccaccgccgaaacctaaccaacaacaccgggacgacagtaggggtcttgtgcttcctgggtacaagtacctcggacccttcaacggactcgacaaaggagagccggtcaacgaggcagacgccgcggccctcgagcacgacaaagcctacgaccaccagctcaagcaaggggacaacccgtacctcaaatacaaccacgcggacgctgaatttcaggagcgtcttcaagaagatacgtctttcgggggcaacctcgggcgagcagtcttccaggccaaaaagagggtactcgagcctcttggtctggttgaggaagctgttaagacggctcctggaaaaaagagacctatagagcagtctcctgcagaaccggactcttcctcgggcatcggcaaatcaggccagcagcccgctaagaaaagactcaattttggtcagactggcgacacagagtcagtcccagaccctcaaccaatcggagaaccccccgcagccccctctggtgtgggatctaatacaatggcttcaggcggtggggcaccaatggcagacaataacgaaggcgccgacggagtgggtaattcctcgggaaattggcattgcgattccacatggatgggcgacagagttatcaccaccagcacaagaacctgggccctccccacctacaataatcacctctacaagcaaatctccagcgaatcgggagccaccaacgacaaccactacttcggctacagcaccccctgggggtattttgactttaacagattccactgtcacttctcaccacgtgactggcagcgactcatcaataacaactggggatttagacccaagaaactcaatttcaagctcttcaacatccaagtcaaggaggtcacgcagaatgatggaaccacgaccatcgccaataaccttaccagcacggtgcaggtcttcacagactctgagtaccagctgccctacgtcctcggttcggctcaccagggctgccttccgccgttcccagcagacgtcttcatgattcctcagtacggctacttgactctgaacaatggcagccaagcggtaggacgttcttcattctactgtctagagtattttccctctcagatgctgaggacgggaaacaacttcaccttcagctacacttttgaagacgtgcctttccacagcagctacgcgcacagccagagtctggatcggctgatgaatcctctcattgaccagtacctgtattacctgagcaaaactcagggtacaagtggaacaacgcagcaatcgagactgcagttcaaccaagctgggcctagctccatggctcagcaggccaaaaactggctaccgggacccagctaccgacagcagcgaatgtctaagacggctaatgacaacaacaacagtgaatttgcttggactgcagccaccaaatattacccgaatggaagaaattctctggtcaatcccgggcccccaatggccagtcacaaggacgatgaggaaaagtatttccccatgcacggaaatctcatctttggaaaacaaggcacaggaactaccaatgtggacattgaatcagtgcttattacagacgaagaagaaatcagaacgactaatcctgtggctacagaacaatacggacaggttgccaccaaccgtcagagtcagaacaccacagcttcctatggaagtgtggacagccagggaatcttacctggaatggtgtggcaggaccgcgatgtctatcttcaaggtcccatttgggccaaaactcctcacacggacggacactttcatccttctccgctcatgggaggctttggactgaaacaccctcctccccagatcctgatcaaaaacacacctgtgccagcgaatcccgcgaccactttcactcctggaaagtttgcttcgttcattacccagtattccaccggacaggtcagcgtggaaatagagtgggagctgcagaaagaaaacagcaaacgctggaacccggaaattcagtacacctccaactacaacaagtcggtgaatgtggagtttaccgtggacgcaaacggtgtttattctgaaccccgccctattggcactcgttaccttacccggaacttgtaatttcctgttaatgaataaaccgatttatgcgtttcagttgaactttggtctctgcgaagggcgaattc

SEQ ID NO: 143 - protein, 735 aa, Artificial Sequence
  Description of Artificial Sequence: Synthetic polypeptide
MAADGYLPDWLEDTLSEGIRQWWKLKPGPPPPKPNQQHRDDSRGLVLPGYKYLGPFNGLDKGEPVNEADAAALEHDKAYDHQLKQGDNPYLKYNHADAEFQERLQEDTSFGGNLGRAVFQAKKRVLEPLGLVEEAVKTAPGKKRPIEQSPAEPDSSSGIGKSGQQPAKKRLNFGQTGDTESVPDPQPIGEPPAAPSGVGSNTMASGGGAPMADNNEGADGVGNSSGNWHCDSTWMGDRVITTSTRTWALPTYNNHLYKQISSESGATNDNHYFGYSTPWGYFDFNRFHCHFSPRDWQRLINNNWGFRPKKLNFKLFNIQVKEVTQNDGTTTIANNLTSTVQVFTDSEYQLPYVLGSAHQGCLPPFPADVFMIPQYGYLTLNNGSQAVGRSSFYCLEYFPSQMLRTGNNFTFSYTFEDVPFHSSYAHSQSLDRLMNPLIDQYLYYLSKTQGTSGTTQQSRLQFNQAGPSSMAQQAKNWLPGPSYRQQRMSKTANDNNNSEFAWTAATKYYPNGRNSLVNPGPPMASHKDDEEKYFPMHGNLIFGKQGTGTTNVDIESVLITDEEEIRTTNPVATEQYGQVATNRQSQNTTASYGSVDSQGILPGMVWQDRDVYLQGPIWAKTPHTDGHFHPSPLMGGFGLKHPPPQILIKNTPVPANPATTFTPGKFASFITQYSTGQVSVEIEWELQKENSKRWNPEIQYTSNYNKSVNVEFTVDANGVYSEPRPIGTRYLTRNL

SEQ ID NO: 144 - DNA, 3122 bp, Artificial Sequence
  Description of Artificial Sequence: Synthetic polynucleotide
agcggccgcgaattcgccctttctacggctgcgtcaactggaccaatgaaaactttcccttcaacgattgcgtcgacaagatggtgatctggtgggaggagggaaagatgaccgccaaggtcgtggaatctgccaaagccattctgggtggaagcaaggttcgtgtggaccagaaatgcaggtcttcggcccagatcgacccgactccggtgattgtcacctctaacaccaacatgtgcgccgtgattgacggaaactcgaccaccttcgagcaccagcagccgttgcaagaccggatgttcaaatttgaacttacccgccgtttggatcatgactttgggaaggtcaccaagcaggaagtcaaagactttttccggtgggctcaagatcacgtgactgaggtggagcatgagttctacgtcaaaaagggtggagccaagaaaaggcccgcccccgatgatgtatatataaatgagcccaagcgggcgcgcgagtcagttgcgcagccatcgacgtcagacgcggaagcttcgataaactacgcggacaggtaccaaaacaaatgttctcgtcacgtgggcatgaatctgatgctgtttccctgtcgacaatgcgaaagaatgaatcagaattcaaatatctgcttcacacacgggcaaaaagactgtttggaatgctttcccgtgtcagaatctcaacccgtttctgtcgtcagaaaaacgtatcagaaactttgttacattcatcatatcatgggaaaagtaccagacgcctgcactgcctgcgacctggtaaatgtggacttggatgactgtatttctgagcaataaatgacttaaatcaggtatggctgctgacggttatcttccagattggctcgaggacactctctctgaaggaatcagacagtggtggaagctcaaacctggcccaccaccgccgaaacctaaccaacaacaccgggacgacagtaggggtcttgtgcttcctgggtacaagtacctcggacccttcaacggactcgacaaaggagagccggtcaacgaggcagacgccgcggccctcgagcacgacaaagcctacgaccaccagctcaagcaaggggacaacccgtacctcaaatacaaccacgcggacgctgaatttcaggagcgtcttcaagaagatacgtctttcgggggcaacctcgggcgagcagtcttccaggccaaaaagagggtactcgagcctcttggtctggttgaggaagctgttaagacggctcctggaaaaaagagacctatagagcagtctcctgcagaaccggactcttcctcgggcatcggcaaatcaggccagcagcccgctaagaaaagactcaattttggtcagactggcgacacagagtcagtcccagaccctcaaccaatcggagaaccccccgcagccccctctggtgtgggatctaatacaatggcttcaggcggtggggcaccaatggcagacaataacgaaggcgccgacggagtgggtaattcctcgggaaattggcattgcgattccacatggatgggcgacagagttatcaccaccagcacaagaacctgggccctccccacctacaataatcgcctctacaagcaaatctccagcgaatcgggagccaccaacgacaaccactacttcggctacagcaccccctgggggtattttgactttaacagattccactgtcacttctcaccacgtgactggcagcgactcatcaacaacaactggggatttagacccaagaaactcaatttcaagctcttcaacatccaagtcaaggaggtcacgcagaatgatggaaccacgaccatcgccaataaccttaccagcacggtgcaggtcttcacagactctgagtaccagctgccctacgtcctcggttcggctcaccagggctgccttccgccgttcccagcagacgtcttcatgattcctcagtacggctacttgactctgaacaatggcagccaagcggtaggacgttcttcattctactgtctagagtattttccctctcagatgctgaggacgggaaacaacttcaccttcagctacacttttgaagacgtgcctttccacagcagctacgcgcacagccagagtctggatcggctgatgaatcctctcattgaccagtacctgtattacctgagcaaaactcagggtacaagtggaacaacgcagcaatcgagactgcagttcagccaagctgggcctagctccatggctcagcaggccaaaaactggctaccgggacccagctaccgacagcagcgaatgtctaagacggctaatgacaacaacaacagtgaatttgcttggactgcagccaccaaatattacctgaatggaagaaattctctggtcaatcccgggcccccaatggccagtcacaaggacgatgaggaaaagtatttccccatgcacggaaatctcatctttggaaaacaaggcacaggaactaccaatgtggacattgaatcagtgcttattacagacgaagaagaaatcagaacaactaatcctgtggctacagaacaatacggacaggttgccaccaaccatcagagtcagaacaccacagcttcctatggaagtgtggacagccagggaatcttacctggaatggtgtggcaggaccgcgatgtctatcttcaaggtcccatttgggccaaaactcctcacacggacggacactttcatccttctccgctcatgggaggctttggactgaaacaccctcctccccagatcctgatcaaaaacacacctgtgccagcgaatcccgcgaccactttcactcctggaaagtttgcttcgttcattacccagtattccaccggacaggtcagcgtggaaatagagtgggagctgcagaaagaaaacagcaaacgctggaacccagaaattcagtacacctccaactacaacaagtcggtgaatgtggagtttaccgtggacgcaaacggtgtttattctgaaccccgccctattggcactcgttaccttacccggaacttgtaatttcctgttaatgaataaaccgatttatgcgtttcagttgaactttggtctctgcgaagggcgaattc

SEQ ID NO: 145 - protein, 735 aa, Artificial Sequence
  Description of Artificial Sequence: Synthetic polypeptide
MAADGYLPDWLEDTLSEGIRQWWKLKPGPPPPKPNQQHRDDSRGLVLPGYKYLGPFNGLDKGEPVNEADAAALEHDKAYDHQLKQGDNPYLKYNHADAEFQERLQEDTSFGGNLGRAVFQAKKRVLEPLGLVEEAVKTAPGKKRPIEQSPAEPDSSSGIGKSGQQPAKKRLNFGQTGDTESVPDPQPIGEPPAAPSGVGSNTMASGGGAPMADNNEGADGVGNSSGNWHCDSTWMGDRVITTSTRTWALPTYNNRLYKQISSESGATNDNHYFGYSTPWGYFDFNRFHCHFSPRDWQRLINNNWGFRPKKLNFKLFNIQVKEVTQNDGTTTIANNLTSTVQVFTDSEYQLPYVLGSAHQGCLPPFPADVFMIPQYGYLTLNNGSQAVGRSSFYCLEYFPSQMLRTGNNFTFSYTFEDVPFHSSYAHSQSLDRLMNPLIDQYLYYLSKTQGTSGTTQQSRLQFSQAGPSSMAQQAKNWLPGPSYRQQRMSKTANDNNNSEFAWTAATKYYLNGRNSLVNPGPPMASHKDDEEKYFPMHGNLIFGKQGTGTTNVDIESVLITDEEEIRTTNPVATEQYGQVATNHQSQNTTASYGSVDSQGILPGMVWQDRDVYLQGPIWAKTPHTDGHFHPSPLMGGFGLKHPPPQILIKNTPVPANPATTFTPGKFASFITQYSTGQVSVEIEWELQKENSKRWNPEIQYTSNYNKSVNVEFTVDANGVYSEPRPIGTRYLTRNL

SEQ ID NO: 146 - DNA, 3121 bp, Artificial Sequence
  Description of Artificial Sequence: Synthetic polynucleotide
gaattcgcccttcgcagagaccaaagttcaactgaaacgaatcaaccggtttattgattaacaagcaattacagattacgggtgaggtaacgggtgccgatggggcgaggctcagaataagtgccatctgtgttaacagcaaagtccacatttgtagatttgtagtagttggaagtgtattgaatctctgggttccagcgtttgctgttttctttctgcagctcccattcaatttccacgctgacctgtccggtgctgtactgcgtgatgaacgacgccagcttagcttgactgaaggtagttggaggatccgcgggaacaggtgtattcttaatcaggatctgaggaggcgggtgtttcagtccaaagccccccatcagcggcgagggatgaaagtttccgtccgtgtgaggaatcttggcccagataggaccctgcaggtacacgtcccggttctgccagaccatgccaggtaaggctccttgactgttgacggcccctacaataggagcggcgttttgctgttgcaggttatcggccaccacgccgtactgttctgtggccactgggttggtggttttaatttcttcctcactggttagcataacgctgctatagtccacgttgccttttccagctccctgtttcccaaacattaagactccgctggacggaaaaaatcgctcttcgtcgtccttgtgggttgccatagcgacaccgggatttaccagagagtctctgccattcagatgatacttggtggcaccggtccaggcaaagttgctgttgttattttgcgacagtgtcgtggagacgcgttgctgccggtagcagggcccgggtagccagtttttggcctgagccgacatgttattaggcccggcctgagaaaatagcaactgctgagttcctgcggtacctcccgtggactgagtccgagacaggtagtacaggtactggtcgatgagggggttcatcagccggtccaggctttggctgtgcgcgtagctgctgtgaaaaggcacgtcctcaaactggtagctgaactcaaagttgttgcccgttctcagcatttgagaaggaaagtactccaggcagtagaaggaggaacggcccacggcctgactgccattgttcagagtcaggtacccgtactgaggaatcatgaagacgtccgccgggaacggaggcaggcagccctggcgcgcagagccgaggacgtacgggagctggtattccgagtccgtaaagacctgaatcgtgctggtaaggttattggcgatggtcttggtgccttcattctgcgtgacctccttgacctggatgttgaagagcttgaagttgagtctcttgggccggaatccccagttgttgttgatgagtcgctgccagtcacgtggtgagaagtggcagtggaatctgttaaagtcaaaatacccccagggggtgctgtagccgaagtaggtgttgtcgttggtgcttcctcccgaagtcccgttggagatttgcttgtagaggtggttgttgtaggtggggagggcccaggttcgggtgctggtggtgatgactctgtcgcccagccatgtggaatcgcaatgccaatttcctgaggaactacccactccgtcggcgccttcgttattgtctgccattggagcgccaccgcctgcagccattgtaccagatcccagaccagaggggcctgcggggggttctccgattggttgagggtcgggcactgactctgagtcgccagtctgcccaaagttgagtctctttttcgcgggctgctggcctttcttgccgatgcccgtagtggagtctggagaacgctggggtgatggctctaccggtctcttctttccaggagccgtcttagcgccttcctcaaccagaccgagaggttcgagaacccgcttcttggcctggaagactgctcgtccgaggttgcccccaaaagacgtatcttcttgcagacgctcctgaaactcggcgtcggcgtggttataccgcaggtacggattgtcacccgctttgagctgctggtcgtaggccttgtcgtgctcgagggccgctgcgtccgccgcgttgacgggctcccccttgtcgagtccgttgaagggtccgaggtacttgtagccaggaagcaccagaccccggccgtcgtcctgcttttgctggttggctttgggcttcggggctccaggtttcagcgcccaccactcgcgaatgccctcagagaggttgtcctcgagccaatctggaagataaccatcggcagccatacctgatctaaatcatttattgttcaaagatgcagtcatccaaatccacattgaccagatcgcaggcagtgcaagcgtctggcacctttcccatgatatgatgaatgtagcacagtttctgatacgcctttttgacgacagaaacgggttgagattctgacacgggaaagcactctaaacagtctttctgtccgtgagtgaagcagatatttgaattctgattcattctctcgcattgtctgcagggaaacagcatcagattcatgcccacgtgacgagaacatttgttttggtacctgtccgcgtagttgatcgaagcttccgcgtctgacgtcgatggctgcgcaactgactcgcgcacccgtttgggctcacttatatctgcgtcactgggggcgggtcttttcttggctccaccctttttgacgtagaattcatgctccacctcaaccacgtgatcctttgcccaccggaaaaagtctttgacttcctgcttggtgaccttcccaaagtcatgatccagacggcgggtgagttcaaatttgaacatccggtcttgcaacggctgctggtgttcgaaggtcgttgagttcccgtcaatcacggcgcacatgttggtgttggaggtgacgatcacgggagtcgggtctatctgggccgaggacttgcatttctggtccacgcgcaccttgcttcctccgagaatggctttggccgactccacgaccttggcggtcatcttcccctcctcccaccagatcaccatcttgtcgacacagtcgttgaagggaaagttctcattggtccagttgacgcagccgtagaagggcgaattc

SEQ ID NO: 147 - protein, 733 aa, Artificial Sequence
  Description of Artificial Sequence: Synthetic polypeptide
MAADGYLPDWLEDNLSEGIREWWDLKPGAPKLKANQQKQDDGRGLVLPGYKYLGPFHGLDKGEPVNAADAAALEHDKAYDQQLKAGDNPYLRYNHADAEFQERLQEDTSFGGNLGRAVFQAKKRVLEPLGLVEEGAKTAPGKKRPLESPQEPDSSSGIGKKGKQPAKKRLNFEEDTGAGDGPPEGSDTSAMSSDIEMRAAPGGNAVDAGQGSDGVGNASGDWHCDSTWSEGKVTTTSTRTWVLPTYNNHLYLRLGTTSNSNTYNGFSTPWGYFDFNRFHCHFSPRDWQRLINNNWGLRPKAMRVKIFNIQVKEVTTSNGETTVANNLTSTVQIFADSSYELPYVMDAGQEGSLPPFPNDVFMVPQYGYCGIVTGENQNQTDRNAFYCLEYFPSQMLRTGNNFEMAYNFEKVPFHSMYAHSQSLDRLMNPLLDQYLWHLQSTTSGETLNQGNAATTFGKIRSGDFAFYRKNWLPGPCVKQQRFSKTASQNYKIPASGGNALLKYDTHYTLNNRWSNIAPGPPMATAGPSDGDFSNAQLIFPGPSVTGNTTTSANNLLFTSEGEIAATNPRDTDMFGQIADNNQNATTAPITGNVTAMGVLPGMVWQNRDIYYQGPIWAKIPHADGHFHPSPLIGGFGLKHPPPQIFIKNTPVPANPATTFTAARVDSFITQYSTGQVAVQIEWEIEKERSKRRNPEVQFTSNYGNQSSMLWAPDTTGKYTEPRVIGSRYLTNHL

SEQ ID NO: 148 - protein, 735 aa, Artificial Sequence
  Description of Artificial Sequence: Synthetic polypeptide
MAADGYLPDWLEDTLSEGIRQWWKLKPGPPPPKPNQQHRDDSRGLVLPGYKYLGPFNGLDKGEPVNEADAAALEHDKAYDHQLKQGDNPYLKYNHADAEFQERLQEDTSFGGNLGRAVFQAKKRVLEPLGLVEEAVKTAPGKKRPIEQSPAEPDSSSGIGKSGQQPAKKRLNFGQTGDTESVPDPQPIGEPPAAPSGVGSNTMASGGGAPMADNNEGADGVGNSSGNWHCDSTWMGDRVITTSTRTWALPTYNNHLYKQISSESGATNDNHYFGYSTPWGYFDFNRFHCHFSPRDWQRLINNNWGFRPKKLNFKLFNIQVKEVTQNDGTTTIANNLTSTVQVFTDSEYQLPYVLGSAHQGCLPPFPADVFMIPQYGYLTLNNGSQAVGRSSFYCLEYFPSQMLRTGNNFTFSYTFEDVPFHSSYAHSQSLDRLMNPLIDQYLYYLSKTQGTSGTTQQSRLQFSQAGPSSMAQQAKNWLPGPSYRQQRMSKTANDNNNSEFAWTAATKYYLNGRNSLVNPGPPMASHKDDEEKYFPMHGNLIFGKQGTGTTNVDIESVLITDEEEIRTTNPVATEQYGQVATNHQSQNTTASYGSVDSQGILPGMVWQDRDVYLQGPIWAKIPHTDGHFHPSPLMGGFGLKHPPPQILIKNTPVPANPATTFTPGKFASFITQYSTGQVSVEIEWELQKENSKRWNPEIQYTSNYNKSVNVEFTVDANGVYSEPRPIGTRYLTRNL

SEQ ID NO: 149 - DNA, 3127 bp, Artificial Sequence
  Description of Artificial Sequence: Synthetic polynucleotide
gcggccgcgaattcgcccttcgcagagaccaaagttcaactgaaacgaatcaaccggtttattgattaacatgcaattacagattacgggtgaggtaacgagtgccaatagggcgaggctcagagtaaacaccctggctgtcaacggcaaagtccacaccagtctgcttttcaaagttggaggtgtactgaatctccgggtcccagcgcttgctgttttccttctgcagctcccactcgatttccacgctgacttgtccggtgctgtactgtgtgatgaacgaagcaaacttggcaggagtaaacacctccggaggattagcgggaacgggagtgttcttgatcaggatctgaggaggcggatgtttaagtccaaagccgcccatcaaaggagacgggtgaaagttgccatccgtgtgaggaatcttggcccagatgggaccctgcaggtacacgtcccggttctgccagaccatgccaggtaaggctccctggttgttgacaacttgtgtctgggctgcagtattagccgcttgtaagttgctgctgactatcccgtattcttccgtggctacaggattagtaggacgaatttcttcttcatttgtcattaacacattttccaatgtagttttgttagttgctccagtttttccaaaaatcaggactccgctggatgggaaaaagcggtcctcgtcgtccttgtgagttgccatggcgacgccgggattaaccaacgagtttctgccgttcaggtgatatttggtggcaccagtccaagcaaagttgctgttgttgttttgatccagcgttttggagaccctttgttgccggaagcagggtccaggtaaccaattcttggcttgttcggccatagttgaaggcccgccctggtaaaactgcagttcccgattgccagctgtgcctcctgggtcactctgtgttctggccaggtagtacaagtactggtcgatgaggggattcatcagccggtccaggctctggctgtgtgcgtagctgctgtggaaaggcacgtcctcgaagctgtagctgaactcaaagttgttgcccgttctcagcatctgagaggggaagtactccaggcagtagaaggaggaacgtcccacagactgactgccattgttgagagtcaggtagccgtactgaggaatcatgaagacgtccgccgggaacggaggcaggcagccctggtgcgcagagccgaggacgtacggcagctggtattccgagtccgagaatacctgaatcgtgctggtaaggttattagcgatggtcgtaacgccgtcattcgtcgtgacctccttgacctggatgttgaagagcttgaaccgcagcttcttgggccggaatccccagttgttgttgatgagtcgctgccagtcacgtggtgagaagtggcagtggaatctgttaaagtcaaaatacccccagggggtgctgtagccgaagtaggtgttgtcgttggtactacctgcagtttcactggagatttgctcgtagaggtggttgttgtaggtgggcagggcccaggttcgggtgctggtggtaatgactctgtcgcccagccatgtggaatcgcaatgccaatttcctgaggcattacccactccgtcggcaccttcgttattgtctgccattggtgcgccaccgcctgcagccactgtaccagatcccacactagagggcgctgctggaggttctccgagaggttgagggtcggggactgactctgagtcgccagtctgaccgaaattgagtctctttctggcgggctgctggcccttcttgccgatgcccgtggaggagtcgggggaacgctgaggtgacggctctaccggtctcttctttgcaggagccgtcttagcgccttcctcaaccagaccgagaggttcgagaacccgcttcttggcctggaagactgctcgcccgaggttgcccccaaatgacgtatcttcttgcagacgctcctgaaactcggcgtcggcgtggttataccgcaggtacgggttgtcacccgcattgagctgctggtcgtaggccttgtcgtgctcgagggccgctgcgtccgccgcgttgacgggctcccccttgtcgagtccgttgaagggtccgaggtacttgtagccaggaagcaccagaccccggccgttgtcctgcttttgctggttggctttgggtttcggggctccaggtttcaggtcccaccactcgcgaatgccctcagagaggttgtcctcgagccaatctggaagataaccatcggcagccatacctgatttaaatcatttattgttcaaagatgcagtcatccaaatccacattgaccagatcgcaggcagtgcaagcgtctggcacctttcccatgatatgatgaatgtagcacagtttctgatacgcctttttgacgacagaaacgggtttagattctgacacgggaaagcactctaaacagtctttctgtccgtgagtgaagcagatatttgaattctgattcattctctcgcattgtctgcagggaaacagcatcagattcatgcccacgtgacgagaacatttgttttggtacctgtctgcgtagttgatcgaagcttccgcgtctgacgtcgatggctgcgcaactgactcgcgcacccgtttgggctcacttatatctgcgtcactgggggcgggtcttttcttggctccaccctttttgacgtagaattcatgctccacctcaaccacgtaatcctttgcccaccggaaaaagtctttgacttcctgcttggtgaccttcccaaagtcatgatccagacggcgggtgagttcaaatttgaacatccggtcttgcaacggctgctggtgttcgaaggtcgttgagttcccgtcgatcacggcgcacatgttggtgttggagatgacgatcgcgggagtcgggtctatctgggccgaggacttgcatttctggtccacgcgcaccttgcttcctccgagaatggctttggccgactccacgaccttggcggtcatcttcccctcctcccaccagatcaccatcttgtcgacacagtcgttgaagggaaagttctcattggtccagttgacgcagccgtagaaagggcgaattc

SEQ ID NO: 150 - protein, 728 aa, Artificial Sequence
  Description of Artificial Sequence: Synthetic polypeptide
MAADGYLPDWLEDNLSEGIREWWDLKPGAPKPKANQQKQDDGRGLVLPGYKYLRPFNGLDKGEPVNEADAAALEHDKAYDKQLEQGDNPYLKYNHADAEFQERLQEDTSFGGNLGRAVFQAKKRVLEPLGLVEEVAKTAPGKKRPIESPDSSTGIGKKGQQPAKKKLNFGQTGDSESVPDPQPLGEPPAAPSGLGSGTMAAGGGAPMADNNEGADGVGNASGNWHCDSTWLGDRVITTSTRTWALPTYNNHLYKQISSQSGATNDNHFFSYSTPWGYFDFNRFHCHFSPRDWQRLINNNWGFRPRKLRFKLFNIQVKEVTTNDGVTTIANNLTSTIQVFSDSEYQLPYVLGSAHQGCLPPFPADVFMIPQYGYLTLNNGSQSVGRSSFYCLEYFPSQMLRTGNNFEFSYTFEEVPFHSSYVHSQSLDRLMNPLIDQYLYYLARTQSTTGSTRELQFHQAGPNTMAEQSKNWLPGPCYRQQRLSKNIDSNNNSNFAWTGATKYHLNGRNSLTNPGVAMATNKDDEDQFFPINGVLVFGKTGAANKTTLENVLMTSEEEIKTTNPVATEEYGVVSSNLQSSTAGPQTQTVNSQGALPGMVWQNRDVCLQGPIWAKIPHTDGNFHPSPLMGGFGLKHPPPQILIKNTPVPANPPEVFTPAKFASFITQYSTGQVSVEIEWELQKENSKRWNPEIQYTSNYAKSNNVEFAVNNEGVYTEPRPIGTRYLTRNL

SEQ ID NO: 151 - DNA, 3106 bp, Artificial Sequence
  Description of Artificial Sequence: Synthetic polynucleotide
gcggccgcgaattcgcccttcgcagagaccaaagttcaactgaaacgaatcaaccggtttattgattaacaagtaattacaggttacgggtgaggtaacgggtgccaatggggcgaggctcagtataaaccccttcgttgttgacagcaaattccacattattagacttggcataatttgaggtgtactgaatctctggattccagcgtttgctgttttctttctgcagttcccactcgatctccacgctgacctggccggtgctgtactgcgtgataaatgaggcaaacttggcaggagtaaacacctctggaggattagcaggtaccggggtgtttttgatgagaatttgaggaggcgggtgtttgagtccaaatccgcccatcaggggagacgggtgaaagttgccgtccgtgtgaggaattttggcccagatgggaccctgcaggcacacgtcccggttctgccagaccatgccgggcagagccccctggctgttgacagtctgtgtctggggtccggccgtagacgattgcaggttgctggagaccacaccgtattcttctgtagccacgggattggtggttttgatctcctcctcgctggtcattagcacgttttccagcgttgtcttgttggcagcccccgttttgccaaaaaccagcactccgttgatgggaaagaactggtcctcgtcgtccttgttggtggccatggctacgcccgggttggttaatgaatttctaccattcagatggtatttagtggccccggtccaggcaaagttactgttgttgttgctgtctatgttttttgacagtctctgctgccgataacagggtccgggcagccagttctttgattgctcggccatggtgttgggcccagcctgatggaactgcagctcccttgtggaccccgtagtgctctgggtccgggccaggtagtacaggtactggtcgatgaggggattcatcagccggtctaggctctggctgtgcacatagctgctgtggaaaggcacttcctcaaaggtgtagctgaattcaaagttattgcccgttctcagcatctgagaaggaaagtactccaggcagtagaaggaggaacgtcccacagactgactgccgttgtttagagtcagatatccgtactgaggaatcatgaacacgtccgcagggaacggagggaggcagccctggtgcgcagagccgaggacgtacggcagttggtactccgagtccgagaagacctgaatcgtgctggtaaggttattagcgatggtcgtaacgccgtcgttcgtcgtgacctccttgacctggatgttgaacaacttgaaccgcagctttctgggccggaatccccagttgttgttgatgagtcgctgccagtcacgtggtgagaagtggcagtggaatctgttgaagtcaaaatagccccagggggtgctgtagctgaagaagtggttgtcgttggtagccccgctctgacttgatatctgcttgtagaggtggttgttgtaggtgggcagggcccaggtgcgggtgctggtggtgatgactctgtcgcccagccatgtggaatcgcaatgccaatttccggaggcattacccactccgtcggcgccttcgttattgtctgccattggtgcgccaccgcctgcagccattgtaccagatcccagacctgagggcgcggcgggaggttctccgagaggttgggggtcgggcactgactctgagtcgccagtctgcccaaagttgagcttctttttagcgggctgctggcctttcttgccgatgcccgtggaggagtcgggggattctatgggtctcttctttccaggagccgtcttagcgacttcctcaaccagaccgagaggttcgagaacccgcttcttggcctggaagactgctcgcccgaggttgcccccaaaagacgtatcttcttgaagacgctcctgaaactcggcgtcggcgtggttgtacttgaggtacgggttgtccccctgctcgagctgcttgtcgtaggccttgtcgtgctcgagggccgcggcgtctgcctcgttgaccggctctcccttgtcgagtccgttgaagggtctgaggtacttgtagccaggaagcaccagaccccggccgtcgtcctgcttttgctggttggctttgggtttcggggctccaggtttcaagtcccaccactcgcgaatgccctcagagaggttgtcctcgagccaatctggaagataaccatcggcagccatacctggtttaagtcatttattgctcagaaacacagtcatccaggtccacgttgaccagatcgcaggccgagcaagcaatctcgggagcccgccccagcagatgatgaatggcacagagtttccgatacgtcctctttctgacgaccggttgagattctgacacgccggggaaacattctgaacagtctctggtcccgtgcgtgaagcaaatgttgaaattctgattcactctctcgcatgtcttgcagggaaacagcatctgaagcatgcccgcgtgacgagaacatttgttttggtacctgtcggcaaagtccaccggagctccttccgcgtctgacgtcgatggattcgcgactgaggggcaggcccgcttgggctcgcttttatccgcgtcatcgggggcgggtctcttgttggccccaccctttctgacgtagaacccatgcgccacctcggtcacgtgatcctgcgcccagcggaagaaccttttgacttcctgctttgtcaccttgccaaagttatgctccagacggcgggtgggttcaaatttgaacatccggtcctgcaacggctgctggtgctcgaaggtggcgctgttcccgtcaatcacggcgcacatgttggtgttggaggtgacggtcacgggggtggggtcgatctgggcggacgacttgcacttttggtccacgcgcaccttgctgccgccgagaatggccttggcggactccacgaccttggccgtcatcttgccctcctcccaccagatcaccatcttgtcggcgcaatcgttgaagggaaagttctcattggtccagttgacgcagccgtagaaagggcgaattc

SEQ ID NO: 152 - protein, 728 aa, Artificial Sequence
  Description of Artificial Sequence: Synthetic polypeptide
MAADGYLPDWLEDNLSEGIREWWDLKPGAPKPKANQQKQDDGRGLVLPGYKYLGPFNGLDKGEPVNEADAAALEHDKAYDKQLEQGDNPYLKYNHADAEFQERLQEDTSFGGNLGRAVFQAKKRVLEPLGLVEEGAKTASGKKRPIESPDSSTGIGKKGQQPAKKKLNFGQTGDSESVPDPQPLGEPPAAPSGLGSGTMAAGGGAPMADNNEGADGVGNASGNWHCDSTWLGDRVITTSTRTWALPTYNNHLYKQISSQSGATNDNHFFGYSTPWGYFDFNRFHCHFSPRDWQRLINNNWGFRPRKLRFKLFNIQVKEVTTNDGVTTIANNLTSTIQVFSDSEYQLPYVLGSAHQGCLPPFPADVFMIPQYGYLTLNNGSQSVGRSSFCCLEYFPSQMLRTGNNFEFSYTFEEVPFHSSYAHSQSLDRLMNPLIDQYLYYLARTQSTTGSTRELQFHQAGPNTVAEQSKNWLPGPCYRQQRLSKNIDSNNNSNFAWTGATKYHLNGRNSLTNPGVAMATNKDDEDQFLPINGVLVFGKTGAANKTTLENVLMTSEEEIKTTNPVATEEYGVVSSNLQSSTAGPRTQTVNSQGALPGMVWQNRDVYLQGPIWAEIPHTDGNFHPSPLMGGFGLKHPPPQILIKNTPVPANPPEVFTPAKFASFITQYSTGQVSVEIEWELQKENSKRWNPEIQYTSNYAKSNNVEFAVNNEGVYTEPRPIGTRYLTRNL

SEQ ID NO: 153 - DNA, 3102 bp, Artificial Sequence
  Description of Artificial Sequence: Synthetic polynucleotide
gcggccgcgaattcgcccttcgcagagaccaaagttcaactgaaacgaatcaaccggtttattgattaacaagtaattacaggttacgggtgaggtaacgggtgccaatggggcgaggctcagtataaaccccttcgttgttgacagcaaattccacattattagacttggcataatttgaggtgtactgaatctctggattccagcgtttgctgttttctttctgcagttcccactcgatctccacgctgacctggccggtgctgtactgcgtgataaatgaggcaaacttggcaggagtaaacacctctggaggattagcaggtaccggggtgtttttgatgagaatttgaggaggcgggtgtttgagtccaaatccgcccatcaggggagacgggtgaaagttgccgtccgtgtgaggaatttcggcccagatgggaccctgcaggtacacgtcccggttctgccagaccatgccgggcagagccccctggctgttgacagtctgtgtccggggtccggccgtagacgattgcaggttgctggagaccacaccgtattcttctgtagccacgggattggtggttttgatctcctcctcgctggtcattagcacgttttccagcgttgtcttgttggcagcccccgttttgccaaaaaccagcactccgttgatgggaaggaactggtcctcgtcgtccttgttggtggccatggctacgcccgggttggttaatgaatttctaccattcagatggtatttagtggccccggtccaggcaaagttactgttgttgttgctgtctatgttttttgacagtctctgctgccgataacagggtccgggcagccagttctttgattgctcggccacggtgttgggcccagcctgatggaactgcagctcccttgtggaccccgtagtgctctgggtccgggccaggtagtacaggtactggtcgatgaggggattcatcagccggtccaggctctggctgtgcgcatagctgctgtggaaaggcacttcctcaaaggtgtagctgaattcaaagttattgcccgttctcagcatctgagaaggaaagtactccaggcagcagaaggaggaacgtcccacagactgactgccgttgtttagagtcagatatccgtactgaggaatcatgaacacgtccgcagggaacggagggaggcagccctggtgcgcagagccgaggacgtacggcagttggtactccgagtccgagaagacctgaatcgtgctggtaaggttattagcgatggtcgtaacgccgtcgttcgtcgtgacctccttgacctggatgttgaacaacttgaaccgcagctttctgggccggaatccccagttgttgttgatgagtcgctgccagtcacgtggtgagaagtggcagtggaatctgttgaagtcaaaatagccccagggggtgctgtagccgaagaagtggttgtcgttggtagccccgctctgacttgatatctgcttgtagaggtggttgttgtaggtgggcagggcccaggtgcgggtgctggtggtgatgactctgtcgcccagccatgtggaatcgcaatgccaatttccggaggcattacccactccgtcggcgccttcgttattgtctgccattggtgcgccaccgcctgcagccattgtaccagatcccagacctgagggcgcggcgggaggttctccgagaggttgggggtcgggcactgactctgagtcgccagtctgcccaaagttgagcttctttttagcgggctgctggcctttcttgccgatgcccgtggaggagtcgggggattctatgggtctcttctttccggaagccgtcttagcgccttcctcaaccagaccgagaggttcgagaacccgcttcttggcctggaagactgctcgcccgaggttgcccccaaaagacgtatcttcttgaagacgctcctgaaactcggcgtcggcgtggttgtacttgaggtacgggttgtccccctgctcgagctgcttgtcgtaggccttgtcgtgctcgagggccgcggcgtctgcctcgttgaccggctctcccttgtcgagtccgttgaagggtccgaggtacttgtagccaggaagcaccagaccccggccgtcgtcctgcttttgctggttggctttgggtttcggggctccaggtttcaagtcccaccactcgcgaatgccctcagagaggttgtcctcgagccaatctggaagataaccatcggcagccatacctggtttaagtcatttattgctcagaaacacagtcatccaggtccacgttgaccagatcgcaggccgagcaagcaatctcgggagcccgccccagcagatgatgaatggcacagagtttccgatacgtcctctttctgacgaccggttgagattctgacacgccggggaaacattctgaacagtctctggtcccgtgcgtgaagcaaatgttgaaattctgattcattctctcgcatgtcttgcagggaaacagcatctgaagcatgcccgcgtgacgagaacatttgttttggtacctgtcggcaaagtccaccggagctccttccgcgtctgacgtcgatggatccgcgactgaggggcaagcccgcttgggctcgcttttatccgcgtcatcgggggcgggtctcttgttggctccaccctttctgacgtagaactcatgcgccacctcggtcacgtgatcctgcgcccagcggaagaactctttgacttcctgctttgtcaccttgccaaagtcatgctccagacggcgggtgagttcaaatttgaacatccggtcttgtaacggctgctggtgctcgaaggtggtgctgttcccgtcaatcacggcgcacatgttggtgttggaagtgacgatcacgggggtgggatcgatctgggcggacgacttgcacttttggtccacgcgcaccttgctgccgccgagaatggccttggcggactccacgaccttggccgtcatcttgccctcctcccaccagatcaccatcttgtcgacgcaatcgttgaagggaaagttctcattggtccagttgacgcagccgaagggcgaattc

SEQ ID NO: 154 - protein, 728 aa, Artificial Sequence
  Description of Artificial Sequence: Synthetic polypeptide
MAADGYLPDWLEDNLSEGIREWWDLKPGAPKPKANQQKQDDGRGLVLPGYRYLGPFNGLDKGEPVNEADAAALEHDKAYDKQLEQGDNPYLKYNHADAEFQERLQEDTSFGGNLGRAVFQAKKRVLEPLGLVEEGAKTAPGKKRPIESPDSSTGIGKNGQPPAKKKLNFGQTGDSESVPDPQPLGEPPAAPSGLGSGTMAAGGGAPMADNNEGADGVGNASGNWHCDSTWLGDRVITTSTRTWALPTYNNHLYKQISSQSGATNDNHFFGYSTPWGYFDFNRFHCHFSPRDWQRLINNNWGFRPRKLRFKLFNIQVKEVTTNDGVTTIANNLTSTIQVFSDSEYQLPYVLGSAHQGCLPPFPADVFMIPQYGYLTLNNGSQSVGRSSFYCLEYFPSQMLRTGNNFEFSYTFEEVPFHSSYAHSQSLDRLMNPLIDQYLYYLARTQSTTGSTRELQFHQAGPNTMAEQSKNWLPGPCYRQQRLSKNIDSNNNSNFAWTGATKYHLNGRNSLTNPGVAMATNKDDEDQFFPINGVLVFGKTGAANKTTLENVLMTSEEEIKTTNPVATEEYGVVSSNLQSSTAGPQTQTVNSQGALPGMVWQNRDVYLQGPIWAKIPHTDGNFHPSPLMGGFGLKHPPPQILIKNTPVPANPPEVFTPAKFASFITQYSTGQVSVEIEWELQKENSKRWNPEIQYTSNYAKSNNVEFAVNNEGVYTEPRPIGTRYLTRNL

SEQ ID NO: 155 - protein, 728 aa, Artificial Sequence
  Description of Artificial Sequence: Synthetic polypeptide
MAADGYLPDWLEGNLSEGIREWWDLKPGAPKPKANQQKQDDGRGLVLPGYRYLGPFNGLDKGEPVNEADAAALEHDKAYDKQLEQGDNPYLKYNHADAEFQERLQEDTSFGGNLGRAVFQAKKRVLEPLGLVEEGAKTAPGKKRPIESPDSSTGIGKNGQPPAKKKLNFGQTGDSESVPDPQPLGEPPAAPSGLGSGTMAAGGGAPMADNNEGADGVGNASGNWHCDSTWLGDRVITTSTRTWALPTYNNHLYKQISSQSGATNDNHFFGYSTPWGYFDFNRFHCHFSPRDWQRLINNNWGFRPRKLRFKLFNIQVKEVTTNDGVTTIANNLTSTIQVFSDSEYQLPYVLGSAHQGCLPPFPADVFMIPQYGYLTLNNGSQSVGRSSFYCLEYFPSQMLRTGDNFEFSYTFEEVPFHSSYAHSQSLDRLMNPLIDQYLYYLARTQSTTGSTRELQFHQAGPNTMAEQSKNWLPGPCYRQQRLSKNIDSNNNSNFAWTGATKYHLNGRNSLTNPGVAMATNKDDEDQFFPINGVLVFGKTGAANKTTLENVLMTSEEEIKTTNPVATEEYGVVSSNLQSSTAGPQTQTVNSQGALPGMVWQNRDVYLQGPIWAKIPHTDGNFHPSPLMGGFGLKHPPPQILIKNTPVPANPPEVFTPAKFASFITQYSTGQVSVEIEWELQKENSKRWNPEIQYTSNYAKSNNVEFAVNNEGVYTEPRPIGTRYLTRNL

SEQ ID NO: 156 - DNA, 3106 bp, Artificial Sequence
  Description of Artificial Sequence: Synthetic polynucleotide
gcggccgcgaattcgcccttcgcagagaccaaagttcaactgaaacgaatcagccggtttattgattaacaagtaattacaggttacgggtgaggtaacgggtgccaatggggcgaggctcagtataaaccccttcgttgttgacagcaaattccacattattagacttggcataatttgaggtgtactgaatctctggattccagcgtttgctgttttctttctgcagttcccactcgatctccacgctgacctggccggtgctgtactgcgtgataaatgaggcaaacttggcaggagtaaacacctctggaggattagcaggtaccggggtgtttttgatgagaatttgaggaggcgggtgtttgagtccaaatccgcccatcaggggagacgggtgaaagttgccgtccgtgtgaggaattttggcccagatgggaccctgcaggtacacgtcccggttctgccagaccatgccgggcagagccccctggctgttgacagtctgtgtctggggtccggccgtagacgattgcaggttgctggagaccacaccgtattcttctgtagccacgggattggtggttttgatctcctcctcgctggtcattagcacgttttccagcgttgtcttgttggcagcccccgttttgccaaaaaccagcactccgttgatgggaaagaactggtcctcgtcgtccttgttggtggccatggctacgcccgggttggttaatgaatttctaccattcagatggtatttagtggccccggtccaggcaaagttactgttgttgttgctgtctatgttttttgacagtctctgctgccgataacagggtccgggcagccagttctttgattgctcggccatggtgttgggcccagcctgatggaactgcagctcccttgtggaccccgtagtgctctgggtccgggccaggtagtacaggtactggtcgatgaggggattcatcagccggtccaggctctggctgtgcgcatagctgctgtggaaaggcacttcctcaaaggtgtagctgaattcaaagttatcgcccgttctcagcatctgagaaggaaagtactccaggcagtagaaggaggaacgtcccacagactgactgccgttgtttagagtcagatatccgtactgaggaatcatgaacacgtccgcagggaacggagggaggcagccctggtgcgcagagccgaggacgtacggcagttggtactccgagtccgagaagacctgaatcgtgctggtaaggttattagcgatggtcgtaacgccgtcgttcgtcgtgacctccttgacctggatgttgaacaacttgaaccgcagctttctgggccggaatccccagttgttgttgatgagtcgctgccagtcacgtggtgagaagtggcagtggaatctgttgaagtcaaaatagccccagggggtgctgtagccgaagaagtggttgtcgttggtagccccgctctgacttgatatctgcttgtagaggtggttgttgtaggtgggcagggcccaggtgcgggtgctggtggtgatgactctgtcgcccagccatgtggaatcgcaatgccaatttccggaggcattacccactccgtcggcgccttcgttattgtctgccattggtgcgccaccgcctgcagccattgtaccagatcccagacctgagggcgcggcgggaggttctccgagaggttgggggtcgggcactgactctgagtcgccagtctgcccaaagttgagcttctttttagcgggcggctggccgttcttgccgatgcccgtggaggagtcgggggattctatgggtctcttctttccaggagccgtcttagcgccttcctcaaccagaccgagaggttcgagaacccgcttcttggcctggaagactgctcgcccgaggttgcccccaaaagacgtatcttcttgaagacgctcctgaaactcggcgtcggcgtggttgtacttgaggtacgggttgtccccctgctcgagctgcttgtcgtaggccttgtcgtgctcgagggccgcggcgtctgcctcgttgaccggctctcccttgtcgagtccgttgaagggtccgaggtacctgtagccaggaagcaccagaccccggccgtcgtcctgcttttgctggttggctttgggtttcggggctccaggtttcaagtcccaccactcgcgaatgccctcagagaggttgccctcgagccaatctggaagataaccatcggcagccatacctggtttaagtcatttattgctcagaaacacagtcatccaggtccacgttggccagatcgcaggccgagcaagcaatctcgggagcccgccccagcagatgatgaatggcacagagtttccgatacgtcctctttctgacgaccggttgagattctgacacgccggggaaacattctgaacagtctctggtcccgtgcgtgaagcaaatgttgaaattctgattcattctctcgcatgtcttgcaggggaacagcatctgaagcatgcccgcgtgacgagaacatttgttttggtacctgtcggcaaagtccaccggagctccttccgcgtctgacgtcgatggatccgcgactgaggggcaggcccgcttgggctcgcttttatccgcgtcatcgggggcgggtctcttgttggctccaccctttctgacgtagaactcatacgccacctcggtcacgtgatcctgcgcccagcggaagaactctttgacttcctgctttgtcaccttgccaaagtcatgctccagacggcgggtgagttcaaatttgaacatccggtcttgtaacggctgctggtgctcgaaggtggtgctgttcccgtcaatcacggcgcacatgttggtgttggaagtgacgatcacgggggtgggatcgatctgggcggacgacttgcacttttggtccacgcgcaccttgctgccgccgagaatggccttggcggactccacgaccttggccgtcatcctgccctcctcccaccagatcaccatcttgtcgacgcaatcgttgaagggaaagttctcattggtccagttgacgcagccgtagaaagggcgaattc

SEQ ID NO: 157 - protein, 728 aa, Artificial Sequence
  Description of Artificial Sequence: Synthetic polypeptide
MAADGYLPDWLEDNLSEGIREWWDLKPGAPKPKANQQKQDDGRGLVLPGYKYLGPFNGLDKGEPVNEADAAALEHDKAYDKQLEQGDNPYLKYNHADAEFQERLQEDTSFGGNLGRAVFQAKKRVLEPLGLVEEGAKTAPGKKRPIESPDSSTGIGKKGQQPAKKKLNFGQTGDSESVPDPQPLGEPPAAPSGLGSGTMAAGGGAPMADNNEGADGVGNASGNWHCDSTWLGDRVITTSTRTWALPTYNNHLYKQISSQSGATNDNHFFGYSTPWGYFDFNRFHCHFSPRDWQRLINNNWGFRPRKLRFKLFNIQVKEVTTNDGVTTIANNLTSTIQVFSDSEYQLPYVLGSAHQGCLPPFPADVFMIPQYGYLTLNNGSQSMGRSSFYCLEYFPSQMLRTGNNFEFSYTFEEVPFHSSYAHSQSLDRLMNPLIDQYLYYLARTQSTTGSTRELQFHQAGPNTMAEQSKNWLPGPCYRQQRLSKNIDSNNNSNFAWTGATKYHLNGRNSLTNPGVAMATNKDDEGQFFPINGVLVFGKTGAANKTTLENVLMTSEEEIKTTNPVATEEYGVVSSNLQSSTAGPQTQTVNSQGALPGMVWQNRDVYLQGPIWAKIPHTDGNFHPSPLMGGFGLKHPPPQILIKNTPVPANPPGVFTPALFASFITQYSTGQVSVEIEWELQKENSKRWNPEIQYTSNYAKSNNVEFAVNNEGVYTEPRPIGTRYLTRNL

SEQ ID NO: 158 - DNA, 3098 bp, Artificial Sequence
  Description of Artificial Sequence: Synthetic polynucleotide
gaattcgcccttcgcagagaccaaagttcaactgaaacgaatcaaccggtttattgattaacaagtaattacaggttacgggtgaggtaacgggtgccaatggggcgaggctcagtataaaccccttcgttgttgacagcaaattccacattattagacttggcataatttgaggtgtactgaatctctggattccagcgtttgctgttttctttctgcagttcccactcgatctccacgctgacctggccggtgctgtactgcgtgataaatgaggcaaactaggcaggagtaaacacccctggaggattagcaggtaccggggtgtttttgatgagaatttgaggaggcgggtgtttgagtccaaatccgcccatcaggggagacgggtgaaagttgccgtccgtgtgaggaattttggcccagatgggaccctgcaggtacacgtcccggttctgccagaccatgccgggcagagccccctggctgttgacagtctgtgtctggggtccggccgtagacgattgcaggttgctggagaccacaccgtattcttctgtagccacgggattggtggttttgatctcctcctcgctggtcattagcacgttttccagcgttgtcttgttggcagcccccgttttgccaaaaaccagcactccgttgatgggaaagaactggccctcgtcgtccttgttggtggccatggctacgcccgggttggttaatgaatttctaccattcagatggtatttagtggccccggtccaggcaaagttactgttgttgttgctgtctatgttttttgacagtctctgctgccgataacagggtccgggcagccagttctttgattgctcggccatggtgttgggcccagcctgatggaactgcagctcccttgtggaccccgtagtgctctgggtccgggccaggtagtacaggtactggtcgatgaggggattcatcagccggtccaggctctggctgtgcgcatagctgctgtggaaaggcacttcctcaaaggtgtagctgaattcaaagttattgcccgttctcagcatctgagaaggaaagtactccaggcagtagaaggaggaacgtcccatagactgactgccgttgtttagagtcagatatccgtactgaggaatcatgaacacgtccgcagggaacggagggaggcagccctggtgcgcagagccgaggacgtacggcagttggtactccgagtccgagaagacctgaatcgtgctggtaaggttattagcgatggtcgtaacgccgtcgttcgtcgtgacctccttgacctggatgttgaacaacttgaaccgcagctttctgggccggaatccccagttgttgttgatgagtcgctgccagtcacgtggtgagaagtggcagtggaatctgttgaagtcaaaatagccccagggggtgctgtagccgaagaagtggttgtcgttggtagccccgctctgacttgatatctgcttgtagaggtggttgttgtaggtgggcagggcccaggtgcgggtgctggtggtgatgactctgtcgcccagccatgtggaatcgcaatgccaatttccggaggcattacccactccgtcggcgccttcgttattgtctgccattggtgcgccaccgcctgcagccattgtaccagatcccagacctgagggcgcggcgggaggttctccgagaggttgggggtcgggcactgactctgagtcgccagtctgcccaaagttgagcttctttttagcgggctgctggcctttcttgccgatgcccgtggaggagtcgggggattctatgggtctcttctttccaggagccgtcttagcgccttcctcaaccagaccgagaggttcgagaacccgcttcttggcctggaagactgctcgcccgaggttgcccccaaaagacgtatcttcttgaagacgctcctgaaactcagcgtcggcgtggttgtacttgaggtacgggttgtccccctgctcgagctgcttgtcgtaggccttgtcgtgctcgagggccgcggcgtctgcctcgttgaccggctctcccttgtcgagtccgttgaagggtccgaggtacttgtagccaggaagcaccagaccccggccgtcgtcctgcttttgctggttggctttgggtttcggggctccaggtttcaagtcccaccactcgcgaatgccctcagagaggttgtcctcgagccaatctggaagataaccatcggcagccatacctggtttaagtcatttattgctcagaaacacagtcatccaggtccacgttgaccagatcgcaggccgagcaagcaatctcgggagcccgccccagcagatgatgaatggcacagagtttccgatacgtcctctttctgacgaccggttgagattctgacacgccggggaaacattctgaacagtctctggtcccgtgcgtgaagcaaatgttgaaattctgattcattctctcgcatgtcttgcagggaaacagcatctgaagcatgcccgcgtgacgagaacatttgttttggtacctgtcggcaaagtccaccggagctccttccgcgtctgacgtcgatggatccgcgactgaggggcaggcccgcttgggctcgcttttatccgcgtcatcgggggcgggcctcttgttggctccaccctttctgacgtagaactcatgcgccacctcggtcacgtgatcctgcgcccagcggaagaactctttgacttcctgctttgtcaccttgccaaagtcctgctccagacggcgggtgagttcaaatttgaacatccggtcttgtaacggctgctggtgctcgaaggtggtgctgttcccgtcaatcacggcgcacatgttggtgttggaagtgacgatcacgggggtgggatcgatctgggcggacgacttgcacttttggtccacgcgcaccttgctgccgccgagaatggccttggcggactccacgaccttggccgtcatcttgccctcctcccaccagatcaccatcttgtcgacgcaatcgttgaagggaaagttctcattggtccagttgacgcagccgtagaaagggcgaattc

SEQ ID NO: 159 - DNA, 2187 bp, Artificial Sequence
  Description of Artificial Sequence: Synthetic polynucleotide
atggctgccgatggttatcttccagattggctcgagggcaacctctctgagggcattcgcgagtggtgggacttgaaacctggagccccgaaacccaaagccaaccagcaaaagcaggacgacggccggggtctggtgcttcctggctacaggtacctcggacccttcaacggactcgacaagggagagccggtcaacgaggcagacgccgcggccctcgagcacgacaaggcctacgacaagcagctcgagcagggggacaacccgtacctcaagtacaaccacgccgacgccgagtttcaggagcgtcttcaagaagatacgtcttttgggggcaacctcgggcgagcagtcttccaggccaagaagcgggttctcgaacctctcggtctggttgaggaaggcgctaagacggctcctggaaagaagagacccatagaatcccccgactcctccacgggcatcggcaagaacggccagccgcccgctaaaaagaagctcaactttgggcagactggcgactcagagtcagtgcccgacccccaacctctcggagaacctcccgccgcgccctcaggtctgggatctggtacaatggctgcaggcggtggcgcaccaatggcagacaataacgaaggcgccgacggagtgggtaatgcctccggaaattggcattgcgattccacatggctgggcgacagagtcatcaccaccagcacccgcacctgggccctgcccacctacaacaaccacctctacaagcagatatcaagtcagagcggggctaccaacgacaaccacttcttcggctacagcaccccctggggctattttgacttcaacagattccactgccacttctcaccacgtgactggcagcgactcatcaacaacaactggggattccggcccagaaagctgcggttcaagttgttcaacatccaggtcaaggaggtcacgacgaacgacggcgttacgaccatcgctaataaccttaccagcacgattcaggtcttctcggactcggagtaccaactgccgtacgtcctcggctctgcgcaccagggctgcctccctccgttccctgcggacgtgttcatgattcctcagtacggatatctgactctaaacaacggcagtcagtctgtgggacgttcctccttctactgcctggagtactttccttctcagatgctgagaacgggcgataactttgaattcagctacacctttgaggaagtgcctttccacagcagctatgcgcacagccagagcctggaccggctgatgaatcccctcatcgaccagtacctgtactacctggcccggacccagagcactacggggtccacaagggagctgcagttccatcaggctgggcccaacaccatggccgagcaatcaaagaactggctgcccggaccctgttatcggcagcagagactgtcaaaaaacatagacagcaacaacaacagtaactttgcctggaccggggccactaaataccatctgaatggtagaaattcattaaccaacccgggcgtagccatggccaccaacaaggacgacgaggaccagttctttcccatcaacggagtgctggtttttggcaaaacgggggctgccaacaagacaacgctggaaaacgtgctaatgaccagcgaggaggagatcaaaaccaccaatcccgtggctacagaagaatacggtgtggtctccagcaacctgcaatcgtctacggccggaccccagacacagactgtcaacagccagggggctctgcccggcatggtctggcagaaccgggacgtgtacctgcagggtcccatctgggccaaaattcctcacacggacggcaactttcacccgtctcccctgatgggcggatttggactcaaacacccgcctcctcaaattctcatcaaaaacaccccggtacctgctaatcctccagaggtgtttactcctgccaagtttgcctcatttatcacgcagtacagcaccggccaggtcagcgtggagatcgagtgggaactgcagaaagaaaacagcaaacgctggaatccagagattcagtacacctcaaattatgccaagtctaataatgtggaatttgctgtcaacaacgaaggggtttatactgagcctcgccccattggcacccgttacctcacccgtaacctgtaa

SEQ ID NO: 160 - protein, 728 aa, Artificial Sequence; identical to SEQ ID NO: 155
  Description of Artificial Sequence: Synthetic polypeptide

SEQ ID NO: 161 - protein, 728 aa, Artificial Sequence
  Description of Artificial Sequence: Synthetic polypeptide
MAADGYLPDWLEDNLSEGIREWWDLKPGAPKPKANQQKQDDGRGLVLPGYRYLGPFNGLDKGEPVNEADAAALEHDKAYDKQLEQGDNPYLKYNHADAEFQERLQEDTSFGGNLGRAVFQAKKRVLEPLGLVEEGAKTAPGKKRPIESPDSSTGIGKNGQPPAKKKLNFGQTGDSESVPDPQPLGEPPAAPSGLGSGTMAAGGGAPMADNNEGADGVGNASGNWHCDSTWLGDRVITTSTRTWALPTYNNHLYKQISSQSGATNDNHFFGYSTPWGYFDFNRFHCHFSPRDWQRLINNNWGFRPRKLRFKLFNIQVKEVTTNDGVTTIANNLTSTIQVFSDSEYQLPYVLGSAHQGCLPPFPADVFMIPQYGYLTLNNGSQSVGRSSFYCLEYFPSQMLRTGDNFEFSYTFEEVPFHSSYAHSQSLDRLMNPLIDQYLYYLARTQSTTGSTRELQFHQAGPNTMAEQSKNWLPGPCYRQQRLSKNIDSNNNSNFAWTGATKYHLNGRNSLTNPGVAMATNKDDEDQFFPINGVLVFGKTGAANKTTLENVLMTSEEEIKTTNPVATEEYGVVSSNLQSSTAGPQTQTVNSQGALPGMVWQNRDVYLQGPIWAKIPHTDGNFHPSPLMGGFGLKHPPPQILIKNTPVPANPPEVFTPAKFASFITQYSTGQVSVEIEWELQKENSKRWNPEIQYTSNYAKSNNVEFAVNNEGVYTEPRPIGTRYLTRNL

SEQ ID NO: 162 - protein, 728 aa, Artificial Sequence; identical to SEQ ID NO: 154
  Description of Artificial Sequence: Synthetic polypeptide

SEQ ID NO: 163 - protein, 728 aa, Artificial Sequence
  Description of Artificial Sequence: Synthetic polypeptide
MAADGYLPDWLEDNLSEGIREWWDLKPGAPKPKANQQKQDDGRGLVLPGYKYLGPFNGLDKGEPVNEADAAALEHDKAYDKQLEQGDNPYLKYNHADAEFQERLQEDTSFGGNLGRAVFQAKKRVLEPLGLVEEGAKTAPGKKRPIESPDSSTGIGKNGQPPAKKKLNFGQTGDSESVPDPQPLGEPPAAPSGLGSGTMAAGGGAPMADNNEGADGVGNASGNWHCDSTWLGDRVITTSTRTWALPTYNNHLYKQISSQSGATNDNHFFGYSTPWGYFDFNRFHCHFSPRDWQRLINNNWGFRPRKLRFKLFNIQVKEVTTNDGVTTIANNLTSTIQVFSDSEYQLPYVLGSAHQGCLPPFPADVFMIPQYGYLTLNNGSQSVGRSSFYCLEYFPSQMLRTGNNFEFSYTFEEVPFHSSYAHSQSLDRLMNPLIDQYLYYLARTQSTTGSTRELQFHQAGPNTMAEQSKNWLPGPCYRQQRLSKNIDSNNNSNFAWTGATKYHLNGRNSLTNPGVAMATNKDDEDQFFPINGVLVFGKTGAANKTTLENVLMTSEEEIKTTNPVATEEYGVVSSNLQSSTAGPQTQTVNSQGALPGMVWQNRDVYLQGPIWAKIPHTDGNFHPSPLMGGFGLKHPPPQILIKNTPVPANPPEVFTPAKFASFITQYSTGQVSVEIEWELQKENSKRWNPEIQYTSNYAKSNNVEFAVNNEGVYTEPRPIGTRYLTRNL

SEQ ID NO: 164 - protein, 728 aa, Artificial Sequence
  Description of Artificial Sequence: Synthetic polypeptide
MAADGYLPDWLEDNLSEGIREWWDLKPGAPKPKANQQKQDDGRGLVLPGYKYLGPFNGLDKGEPVNEADAAALEHDKAYDKQLEQGDNPYLKYNHADAEFQERLQEDTSFGGNLGRAVFQAKKRVLEPLGLVEEGAKTAPGKKRPIESPDSSTGIGKKGQQPAKKKLNFGQTGDSESVPDPQPLGEPPAAPSGLGSGTMAAGGGAPMADNNEGADGVGNASGNWHCDSTWLGDRVITTSTRTWALPTYNNHLYKQISSQSGATNDNHFFGYSTPWGYFDFNRFHCHFSPRDWQRLINNNWGFRPRKLRFKLFNIQVKEVTTNDGVTTIANNLTSTIQVFSDSEYQLPYVLGSAHQGCLPPFPADVFMIPQYGYLTLNNGSQSVGRSSFYCLEYFPSQMLRTGNNFEFSYTFEEVPFHSSYAHSQSLDRLMNPLIDQYLYYLARTQSTTGSTRELQFHQAGPNTMAEQSKNWLPGPCYRQQRLSKNIDSNNNSNFAWTGATKYHLNGRNSLTNPGVAMATNKDDEDQFFPINGVLVFGKTGAANKTTLENVLMTSEEEIKTTNPVATEEYGVVSSNLQSSTAGPQTQTVNSQGALPGMVWQNRDVYLQGPIWAKIPHTDGNFHPSPLMGGFGLKHPPPQILIKNTPVPANPPEVFTPAKFASFITQYSTGQVSVEIEWELQKENSKRWNPEIQYTSNYAKSNNVEFAVNNEGVYTEPRPIGTRYLTRNL

SEQ ID NO: 165 - DNA, 2215 bp, Artificial Sequence
  Description of Artificial Sequence: Synthetic polynucleotide
atggctgccgatggttatcttccagattggctcgaggacactctctctgaaggaataagacagtggtggaagctcaaacctggcccaccaccaccaaagcccgcagagcggcataaggacgacagcaggggtcttgtgcttcctgggtacaagtacctcggacccttcaacggactcgacaagggagagccggtcaacgaggcagacgccgcggccctcgagcacgacaaagcctacgaccggcagctcgacagcggagacaacccgtacctcaagtacaaccacgccgacgccgagttccaggagcggctcaaagaagatacgtcttttgggggcaacctcgggcgagcagtcttccaggccaaaaagaggcttcttgaacctcttggtctggttgaggaagcggctaagacggctcctggaaagaagaggcctgtagagcactctcctgtggagccagactcctcctcgggaaccggaaaggcgggccagcagcctgcaagaaaaagattgaattttggtcagactggagacgcagactcagtcccagaccctcaaccaatcggagaacctcccgcagccccctcaggtgtgggatctcttacaatggctgcaggcggtggcgcaccaatggcagacaataacgagggcgccgacggagtgggtaattcctcgggaaattggcattgcgattccacatggatgggcgacagagtcatcaccaccagcacccgaacctgggccctgcccacctacaacaaccacctctacaagcaaatctccaacagcacatctggaggatcttcaaatgacaacgcctacttcggctacagcaccccctgggggtattttgactttaacagattccactgccacttttcaccacgtgactggcagcgactcatcaacaacaactggggattccggcccaagagactcagcttcaagctcttcaacatccaggtcaaggaggtcacgcagaatgaaggcaccaagaccatcgccaataacctcaccagcaccatccaggtgtttacggactcggagtaccagctgccgtacgttctcggctctgcccaccagggctgcctgcctccgttcccggcggacgtgttcatgattccccagtacggctacctaacactcaacaacggtagtcaggccgtgggacgctcctccttctactgcctggaatactttccttcgcagatgctgagaaccggcaacaacttccagtttacttacaccttcgaggacgtgcctttccacagcagctacgcccacagccagagcttggaccggctgatgaatcctctgattgaccagtacctgtactacttgtctcggactcaaacaacaggaggcacgacaaatacgcagactctgggcttcagccaaggtgggcctaatacaatggccaatcaggcaaagaactggctgccaggaccctgttaccgccagcagcgagtatcaaagacatctgcggataacaacaacagtgaatactcgtggactggagctaccaagtaccacctcaatggcagagactctctggtgaatccgggcccggccatggcaagccacaaggacgatgaagaaaagtttttttcctcagagcggggttctcatctttgggaagcaaggctcagagaaaacaaatgtggacattgaaaaggtcatgattacagacgaagaggaaatcaggacaaccaatcccgtggctacggagcagtatggttctgtatctaccaacctccagagaggcaacagacaagcagctaccgcagatgtcaacacacaaggcgttcttccaggcatggtctggcaggacagagatgtgtaccttcaggggcccatctgggcaaagattccacacacggacggacattttcacccctctcccctcatgggtggattcggacttaaacaccctccgcctcagatcctgatcaagaacacgcctgtacctgcggatcctccgaccaccttcaaccagtcaaagctgaactctttcatcacccagtattctactggccaagtcagcgtggagatcgagtgggagctgcagaaggaaaacagcaagcgctggaaccccgagatccagtacacctccaactactacaaatctacaagtgtggactttgctgttaatacagaaggcgtgtactctgaaccccgccccattggcacccgttacctcacccgtaatctgtaa

SEQ ID NO: 166 - protein, 737 aa, Artificial Sequence
  Description of Artificial Sequence: Synthetic polypeptide
MAADGYLPDWLEDTLSEGIRQWWKLKPGPPPPKPAERHKDDSRGLVLPGYKYLGPFNGLDKGEPVNEADAAALEHDKAYDRQLDSGDNPYLKYNHADAEFQERLKEDTSFGGNLGRAVFQAKKRLLEPLGLVEEAAKTAPGKKRPVEHSPVEPDSSSGTGKAGQQPARKRLNFGQTGDADSVPDPQPIGEPPAAPSGVGSLTMAAGGGAPMADNNEGADGVGNSSGNWHCDSTWMGDRVITTSTRTWALPTYNNHLYKQISNSTSGGSSNDNAYFGYSTPWGYFDFNRFHCHFSPRDWQRLINNNWGFRPKRLSFKLFNIQVKEVTQNEGTKTIANNLTSTIQVFTDSEYQLPYVLGSAHQGCLPPFPADVFMIPQYGYLTLNNGSQAVGRSSFYCLEYFPSQMLKTGNNFQFTYTFEDVPFHSSYAHSQSLDRLMNPLIDQYLYYLSRTQTTGGTTNTQTLGFSQGGPNTMANQAKNWLPGPCYRQQRVSKTSADNNNSEYSWTGATKYHLNGRDSLVNPGPAMASHKDDEEKFFPQSGVLIFGKQGSEKTNVDIEKVMITDEEEIRTTNPVATEQYGSVSTNLQRGNRQAATADVNTQGVLPGMVWQDRDVYLQGPIWAKIPHTDGHFHPSPLMGGFGLKHPPPQILIKNTPVPADPPTTFNQSKLNSFITQYSTGQVSVEIEWELQKENSKRWNPEIQYTSNYYKSTSVDFAVNTEGVYSEPRPIGTRYLTRNL

SEQ ID NO: 167 - protein, 737 aa, Artificial Sequence
  Description of Artificial Sequence: Synthetic polypeptide
MAADGYLPDWLEDTLSEGIRQWWKLKPGPPPPKPAERHKDDSRGLVLPGYKYLGPFNGLDKGEPVNEADAAALEHDKAYDRQLDSGDNPYLKYNHADAEFQERLKEDTSFGGNLGRAVFQAKKRLLEPLGLVEEAAKTAPGKKRPVEHSPVEPDSSSGTGKAGQQPARKRLNFGQTGDADSVPDPQPIGEPPAAPSGVGSLTMAAGGGAPMADNNEGADGVGNSSGNWHCDSTWMGDRVITTSTRTWALPTYNNHLYKQISNSTSGGSSNDNAYFGYSTPWGYFDFNRFHCHFSPRDWQRLINNNWGFRPKRLSFKLFNIQVKEVTQNEGTKTIANNLTSTIQVFTDSEYQLPYVLGSAHQGCLPPFPADVFMIPQYGYLTLNNGSQAVGRSSFYCLEYFPSQMLKTGNNFQFTYTFEDVPFHSSYAHSQSLDRLMNPLIDQYLYYLSRTQTTGGTTNTQTLGFSQGGPNTMANQAKNWLPGPCYRQQRVSKTSADNNNSEYSWTGATKYHLNGRDSLVNPGPAMASHKDDEEKFFPQSGVLIFGKQGSEKTNVDIEKVMITDEEEIRTTNPVATEQYGSVSTNLQQGNTQAATADVNTQGVLPGMVWQDRDVYLQGPIWAKIPHTDGHFHPSPLMGGFGLKHPPPQILIKNTPVPADPPTTFNQSKLNSFITQYSTGQVSVEIEWELQKENSKRWNPEIQYTSNYYKSTSVDFAVNTEGVYSEPRPIGTRYLTRNL

SEQ ID NO: 168 - protein, 737 aa, Artificial Sequence
  Description of Artificial Sequence: Synthetic polypeptide
MAADGYLPDWLEDTLSEGIRQWWKLKPGPPPPKPAERHKDDSRGLVLPGYKYLGPFNGLDKGEPVNEADAAALEHDKAYDRQLDSGDNPYLKYNHADAEFQERLKEDTSFGGNLGRAVFQAKKRLLEPLGLVEEAAKTAPGKKRPVEHSPVEPDSSSGTGKAGQQPARKRLNFGQTGDADSVPDPQPIGEPPAAPSGVGSLTMAAGGGAPMADNNEGADGVGNSSGNWHCDSTWMGDRVITTSTRTWALPTYNNHLYKQISNSTSGGSSNDNAYFGYSTPWGYFDFNRFHCHFSPRDWQRLINNNWGFRPKRLSFKLFNIQVKEVTQNEGTKTIANNLTSTIQVFTDSEYQLPYVLGSAHQGCLPPFPADVFMIPQYGYLTLNNGSQAVGRSSFYCLEYFPSQMLRTGNNFQFTYTFEDVPFHSSYAHSQSLDRLMNPLIDQYLYYLSRTQTTGGTTNTQTLGFSQGGPNTMANQAKNWLPGPCYRQQRVSKTSADNNNSEYSWTGATKYHLNGRDSLVNPGPAMASHKDDEEKFFPQSGVLIFGKQGSEKTNVDIEKVMITDEEEIRTTNPVATEQYGSVSTNLQQGNTQAATADVNTQGVLPGMVWQDRDVYLQGPIWAKIPHTDGHFHPSPLMGGFGLKHPPPQILIKNTPVPADPPTTFNQSKLNSFITQYSTGQVSVEIEWELQKENSKRWNPEIQYTSNYYKSTSVDFAVNTEGVYSEPRPIGTRYLTRNL

SEQ ID NO: 169 - protein, 729 aa, Artificial Sequence
  Description of Artificial Sequence: Synthetic polypeptide
MAADGYLPDWLEDNLSEGIREWWDLKPGAPKPKANQQKQDDGRGLVLPGYKYLGPFNGLDKGEPVNAADAAALEHDKAYDQQLKAGDNPYLRYNHADAEFQERLQEDTSFGGNLGRAVFQAKKRVLEPLGLVEEGAKTAPGKKRPIDSPDSSTGIGKKGQQPAKKKLNFGQTGDSESVPDPQPLGEPPAAPSSVGSGTMAAGGGAPTADNNEGADGVGNASGNWHCDSTWLGDRVITTSTRTWALPTYNNHLYKQISSSSSGATNDNHYFGYSTPWGYFDFNRFHCHFSPRDWQRLINNNWGFRPKKLRFKLFNIQVKEVTTNDGVTTIANNLTSTVQVFSDSEYQLPYVLGSAHQGCLPPFPADVFMIPQYGYLTLNNGSQSVGRSSFYCLEYFPSQMLRTGNNFEFSYSFEDVPFHSSYAHSQSLDRLMNPLIDQYLYYLARTQSTTGSTRELQFHQAGPNTMAEQSKNWLPGPCYRQQRLSKNLDFNNNSNFAWTAATKYHLNGRNSLTNPGIPMATNKDDEDQFFPINGVLVFGKTGAANKTTLENVLMTSEEEIKTTNPVATEEYGVVSSNLQSSTAGPQSQTINSQGALPGMVWQNRDVYLQGPIWAKIPHTDGNFHPSPLMGGFGLEHPPPQILIKNTPVPANPPEVFTPAKFASFITQYSTGQVSVEIEWELQKENSKRWNPEIQYTSNYAKSNNVEFAVNPDGVYTEPRPIGTRYLTRNL

SEQ ID NO: 170 - DNA, 3075 bp, Artificial Sequence
  Description of Artificial Sequence: Synthetic polynucleotide
tgagaactttcctttcaacgattgcgtcggacaagatggtgatctggtgggaggaggggaagatgaccgccaaggtcgtggagtcggccaaagccattcttggaggaagcaaggtgcgtgtggaccagaaatgcaagtcctcggcccagatagacccgactcccgtgatcgtcacctccaacaccaacatgtgcgccgtgattgacgggaactcaacgaccttcgagcaccagcagccgttgcaagaccggatgttcaaatttgaacttacccgccgtctggatcatgactttggaaaggtcaccaagcaggaagtgaaagactttttccggtgggcaaaggatcacgtggttgaggtggagcatgaattctacgtcaaaaagggtggagctaagaaaagacccgcccccagtgacgcagatataagtgagcccaaacgggcgcgcgagtcagttgcgcagccatcaacgtcagacgcggaagcttcgatcaactacgcggacaggtaccaaaaacaaatgttctcgtcacgtgggcatgaatctgatgctgtttccctgcagacaatgcgagagaatgaatcagaattcaaatatctgcttcactcacggacagaaagactgtttagagtgctttcccgtgtcagaatctcaacccgtttctgtcgtcaaaaaggcgtatcagaaactgtgctacattcatcatatcatgggaaaggtgccagacgcttgcactgcctgcgatctggtcaatgtggatttggatgactgcatctctgaacaataaatgatttaaatcaggtatggctgccgatggttatcctccagattggctcgaggacactctctctgaagggataagacagtggtggaagctcaaacctggcccaccaccaccaaagcccgcagagcggcataaggacgacagcaggggtcttgtgcttcctgggtacaagtacctcggacccttcaacggactcgacaagggggagccggtcaacgaggcagacgccgcggccctcgagcacgacaaggcctacgaccggcagctcgacagcggagacaacccgtacctcaagtacaaccacgccgacgcagagtttcaggagcgccttaaagaagatacgtcttttgggggcaacctcggacgagcagtcttccaggcgaaaaagagggttcttgaacctctgggcctggttgaggaacctgttaagacggctccgggaaaaaagaggccggtagagcactctcctgtggagccagactcctcctcgggaaccggaaaagcgggccagcggcctgcaagaaaaagattaaattttggtcagactggagacgcagactccgtacctgacccccagcctctcggacagccaccagcagccccctctggtctgggatctactacaatggctacaggcagtggcgcaccaatggcagacaataacgagggtgccgatggagtgggtaattcctcaggaaattggcattgcgattcccaatggctgggcgacagagtcatcaccaccagcacccgaacctgggccctgcccacatacaacaaccacctctacaagcaaatctccagccaatcaggagccagcaacgacaaccactactttggctacagcaccccctgggggtattttgacttcaacagattccactgccacttttcaccacgtgactggcaaagactcatcaacaacaactggggattccggcccaaaagactcaacttcaagctctttaatattcaagtcaaagaggtcacgcagaatgacggtacgacgacgattgccaataaccttaccagcacggttcaggtgtttactgactcggagtaccagctcccgtacgtcctgggctcggcgcatcaaggatgcctcccgccgtttccagcggacgtcttcatggtcccacagtatggatacctcaccctgaacaacgggagtcaggcggtaggacgctcttccttttactgcctggagtactttccttctcagatgctgcgtactggaaacaactttcagttcagctacacttttgaagacgtgcctttccacagcagctacgctcacagccagagtctggatcggctgatgaatcctctgatcgaccagtacctgtattatctgaacaagacacaaacaaatagtggaactcttcagcagtctcggctactgtttagccaagctggaccaaccaacatgtctcttcaagctaaaaactggctgcctggaccttgctacagacagcagcgtctgtcaaaacaggcaaacgacaacaacaacagcaactttccctggactgcagctacaaagtatcatctaaatggccgggactcgttggttaatccaggaccagctatggccagtcacaaggatgacgaagaaaagtttttccccatgcatggaaccctgatatttggtaaacaaggaacaaatgccaacgacgcggatttggaaaatgtcatgattacagatgaagaagaaatcagggccaccaatcccgtggctacggagcagtacgggactgtgtcaaataatttgcaaaactcaaacactggtccaactactggaactgtcaatcgccaaggagcgttacctggtatggtgtggcaggatcgagacgtgtacctgcagggacccatttgggccaagattcctcacaccgatggacactttcatccttctccactgatgggaggttttggactcaaacacccgcctcctcagatcatgatcaaaaacactcccgttccagccaatcctcccacaaacttcagttctgccaagtttgcttctttcatcacacagtattccacgggacaggtcagcgtggagatcgagtgggagctgcagaaggagaacagcaaacgctggaatcccgaaattcagtacacttccaactacaacaagtctgttaatgtggactttactgtggacactaatggtgtgtattcagagcctcgccccattggcaccagatacctgactcgtaatctgtaattgcttgttaatcaataaaccgtttaattcgtttcagttgaactttggtctctgcgaagggcgaa

SEQ ID NO: 171 - DNA, 3142 bp, Artificial Sequence
  Description of Artificial Sequence: Synthetic polynucleotide
aaaacgacgggccagtgattgtaatacgactcactatagggcgaaattgaaattagcggccgcgaattcgcctttcgcagagaccaaagttcaactgaaacgaattaaacggtttattgattaacaagcaattacagattacgagtcaggtatctggtgccaatggggcgaggctctgaatacacaccattagtgtccacagtaaagtccacattaacagacttgttgtagttggaagtgtactgaatttcgggattccagcgtttgctgttctccttctgcagctcccactcgatctccacgctgacctgtcccgtggaatactgtgtgatgaaagaagcaaacttggcagaactgaagtttgtgggaggattggctggaacgggagtgtttttgatcatgatctgaggaggcgggtgtttgagtccaaaacctcccatcagtggagaaggatgaaagtgtccatcggtgtgaggaatcttggcccaaatgggtccctgcaggtacacgtctcgatcctgccacaccataccaggtaacgctccttggtgattgacagttccagtagttggaccagtgtttgagttttgcaaattatttgacacagtcccgtactgctccgtagccacgggattggtggccctgatttcttcttcatctgtaatcatgacattttccaaatccgcgtcgttggcatttgttccttgtttaccaaatatcagggttccatgcatggggaaaaacttttcttcgtcatccttgtgactggccatagctggtcctggattaaccaacgagtcccggccatttagatgatactttgtagctgcagtccagggaaagttgctgttgttgttgtcgtttgcctgttttgacagacgctgctgtctgtagcaaggtccaggcagccagtttttagcttgaagagacatgttggttggtccagcttggctaaacagtagccgagactgctgaagagttccactatttgtttgtgtcttgttcagataatacaggtactggtcgatcagaggattcatcagccgatccagactctggctgtgagcgtagctgctgtggaaaggcacgtcttcaaaagtgtagctgaactgaaagttgtttccagtacgcagcatctgagaaggaaagtactccaggcagtaaaaggaagagcgtcctaccgcctgactcccgttgttcagggtgaggtatccatactgtgggaccatgaagacgtccgctggaaacggcgggaggcatccttgatgcgccgagcccaggacgtacgggagctggtactccgagtcagtaaacacctgaaccgtgctggtaaggttattggcaatcgtcgtcgtaccgtcattctgcgtgacctctttgacttgaatattaaagagcttgaagttgagtcttttgggccggaatccccggttgttgttgacgagtctttgccagtcacgtggtgaaaagtggcagtggaatctgttgaagtcaaaatacccccagggggtgctgtagccaaagtagtggttgtcgttgctggctcctgattggctggagatttgcttgtagaggtggttgttgtatgtgggcagggcccaggttcgggtgctggtggtgatgactctgtcgcccagccattgggaatcgcaatgccaatttcctgaggaattacccactccatcggcaccctcgttattgtctgccattggtgcgccactgcctgtagccattgtagtagatcccagaccagagggggctgctggtggctgtccgagaggctgggggtcaggtacggagtctgcgtctccagtctgaccaaaatttaatctttttcttgcaggctgctggcccgcttttccggttcccgaggaggagtctggctccacaggagagtgctctaccggcctcttttttcccggagccgtcttaacaggctcctcaaccaggcccagaggttcaagaaccctctttttcgcctggaagactgctcgtccgaggttgcccccaaaagacgtatcttctttaaggcgctcctgaaactctgcgtcggcgtggttgtacttgaggtacgggttgtctccgctgtcgagctgccggtcgtaggccttgtcgtgctcgagggccgcggcgtctgcctcgttgaccggctcccccttgtcgagtccgttgaagggtccgaggtacttgtacccaggaagcacaagacccctgctgtcgtccttatgccgctctgcgggctttggtggtggtgggccaggtttgagcttccaccactgtcttattccttcagagagagtgtcctcgagccaatctggaagataaccatcggcagccatacctgatttaaatcatttattgttcagagatgcagtcatccaaatccacattgaccagatcgcaggcagtgcaagcgtctggcacctttcccatgatatgatgaatgtagcacagtttctgatacgcctttttgacgacagaaacgggttgagattctgacacgggaaagcactctaaacagtctttctgtccgtgagtgaagcagatatttgaattctgattcattctctcgcattgtctgcagggaaacagcatcagattcatgcccacgtgacgagaacatttgttttggtacctgtccgcgtagttgatcgaagcttccgcgtctgacgtcgatggctgcgcaactgactcgcgcgcccgtttgggctcacttatatctgcgtcactgggggcgggtcttttcttagctccaccctttttgacgtagaattcatgctccacctcaaccacgtgatcctttgcccaccggaaaaagtctttcacttcctgcttggtgacctttccaaagtcatgatccagacggcgggtaagttcaaatttgaacatccggtcttgcaacggctgctggtgctcgaaggtcgttgagttcccgtcaatcacggcgcacatgttggtgttggaggtgacgatcacgggagtcgggtctatctgggccgaggacttgcatttctggtccacacgcaccttgcttcctccaagaatggctttggccgactccacgaccttggcggtcatcttcccctcctcccaccagatcaccatcttgtcgacgcaatggtaaaaggaaagttctcattgg

SEQ ID NO: 172 - protein, 735 aa, Adeno-associated virus-2
MAADGYLPDWLEDTLSEGIRQWWKLKPGPPPPKPAERHKDDSRGLVLPGYKYLGPFNGLDKGEPVNEADAAALEHDKAYDRQLDSGDNPYLKYNHADAEFQERLKEDTSFGGNLGRAVFQAKKRVLEPLGLVEEPVKTAPGKKRPVEHSPVEPDSSSGTGKAGQQPARKRLNFGQTGDADSVPDPQPLGEPPATPAAVGPTTMASGGGAPMADNNEGADGVGNASGNWHCDSTWLGDRVITTSTRTWALPTYNNHLYKQISSASTGASNDNHYFGYSTPWGYFDFNRFHCHFSPRDWQRLINNNWGFRPKRLNFKLFNIQVKEVTQNDGTTTIANNLTSTVQVFTDSEYQLPYVLGSAHQGCLPPFPADVFMIPQYGYLTLNNGSQAVGRSSFYCLEYFPSQMLRTGNNFTFSYTFEDVPFHSSYAHSQSLDRLMNPLIDQYLYYLNRTQNQSGSAQDKALLFSRGSPAGMSVQPKNWLPGPCYRQQRVSKTKTDNNNSNFTWTGASKYNLNGRESIINPGTAMASHKDDKDKFFPMSGVMIFGKESAGASNTALDNVMITDEEEIKATNPVATERFGTVAVNFQSSSTDPATGDVHVMGALPGMVWQDRDVYLQGPIWAKIPHTDGHFHPSPLMGGFGLKHPPPQILIKNTPVPANPPAEFSATKFASFITQYSTGQVSVEIEWELQKENSKRWNPEVQYTSNYAKSANVDFTVDNNGLYTEPRPIGTRYLTRP

SEQ ID NO: 173 - protein, 740 aa, Adeno-associated virus-2
MAADGYLPDWLEDTLSEGIRQWWKLKPGPPPPKPAERHKDDSRGLVLPGYKYLGPFNGLDKGEPVNAADAAALEHDKAYDRQLDSGDNPYLKYNHADAEFQERLKEDTSFGGNLGRAVFQAKKRVLEPLGLVEEPVKTAPGKKRPVEHSPVEPDSSSGTGKAGQQPARKRLNFGQTGDADSVPDPQPLGQPPAAPSGLGTNTMATGSGAPMADNNEGADGVGNSSGNWHCDSTWMGDRVITTSTRTWALPTYNNHLYKQISSQSGASNDNHYFGYSTPWGYFDFNRFHCHFSPRDWQRLINNNWGFRPKRLNFKLFNIQVKEVTQNDGTTTIANNLTSTVQVFTDSEYQLPYVLGSAHQGCLPPFPADVFMVPQYGYLTLNNGSQAVGRSSFYCLEYFPSQMLRTGNNFTFSYTFEDVPFHSSYAHSQSLDRLMNPLIDQYLYYLSRTNTPSGTTTQSGLQFSQAGASDIRDQSRNWLPGPCYRQQRVSKTSADNNNSEYSWTGATKYHLNGRDSLVNPGPAMASHKDDEEKFFPQSGVLIFGKQGSEKTNVDIEKVMITDEEEIRTTNPVATEQYGSVSTNLQRGNRQAATADVNTQGVLPGMVWQDRDVYLQGPIWAKIPHTDGHFHPSPLMGGFGLKHPPPQILIKNTPVPANPSTTFSAAKFASFITQYSTGQVSVEIEWELQKENSKRWNPEIQYTSNYNKSVNVDFTVDTNGVYSEPRPIGTRYLTRNLLLAAA

SEQ ID NO: 174 - protein, 734 aa, Adeno-associated virus-2
MAADGYLPDWLEDTLSEGIRQWWKLKPGPPPPKPAERHKDDSRGLVLPGYKYLGPFNGLDKGEPVNEADAAALEHDKAYDRQLDSGDNPYLKYNHADAEFQERLKEDTSFGGNLGRAVFQAKKRVLEPLGLVEEPVKTAPGKKRPVEHSPVEPDSSSGTGKAGQQPARKRLNFGQTGDADSVPDPQPLGQPPAAPSGLGTNTMATGSGAPMADNNEGADGVGNSSGNWHCDSTWMGDRVITTSTRTWALPTYNNHLYKQISSQSGASNDNHYFGYSTPWGYFDFNRFHCHFSPRDWQRLINNNWGFRPKRLNFKLFNIQVKEVTQNDGTTTIANNLTSTVQVFTDSEYQLPYVLGSAHQGCLPPFPADVFMVPQYGYLTLNNGSQAVGRSSFYCLEYFPSQMLRTGNNFTFSYTFEDVPFHSSYAHSQSLDRLMNPLIDQYLYYLSRTNTPSGTTTQSGLQFSQAGASDIRDQSRNWLPGPCYRQQRVSKTSADNNNSEYSWTGATMYHLNGRDSLVNPGPAMASHKDDEEKFFPQSGVLIFGKQGSEKTNVDIEKVMITDEEEIRTTNPVATEQYGSVSTNLQRGNRQAATADVNTQGVLPGMVWQDRDVYLQGPIWAKIPHTDGHFHPSPLMGGFGLKHPPPQILIKNTPVPANPSTTFSAAKFASFITQYSTGQVSVEIEWELQKENSKRWNPEIQYTSNYNKSINVDFTVDTNGVYSEPRPIGTRYLTRN

SEQ ID NO: 175 - protein, 734 aa, Adeno-associated virus-2
MAADGYLPDWLEDTLSEGIRQWWKLKPGPPPPKPAERHKDDSRGLVLPGYKYLGPFNGLDKGEPVNEADAAALEHDKAYDRQLDSGDNPYLKYNHADAEFQERLKEDTSFGGNLGRAVFQAKKRVLEPLGLVEEPVKTAPGKKRPVEHSPVEPDSSSGTGKAGQQPARKRLNFGQTGDADSVPDPQPLGQPPAAPSGLGTNTMATGSGAPMADNNEGADGVGNSSGNWHCDSTWMGDRVITTSTRTWALPTYNNHLYKQISSQSGASNDNHYFGYSTPWGYFDFNRFHCHFSPRDWQRLINNNWGFRPKRLNFKLFNIQVKEVTQNDGTTTIANNLTSTVQVFTDSEYQLPYVLGSAHQGCLPPFPADVFMVPQYGYLTLNNGSQAVGRSSFYCLEYFPSQMLRTGNNFTFSYTFEDVPFHSSYAHSQSLDRLMNPLIDQYLYYLSRTNTPSGTTTQSGLQFSQAGASDIRDQSRNWLPGPCYRQQRVSKTSADNNNSEYSWTGATKYHLNGRDSLVNPGPAMASHKDDEEKFFPQSGVLIFGKQGSEKTNVDIEKVMITDEEEIRTTNPVATEQYGSVSTNLQRGNRQAATADVNTQGVLPGMVWQDRDVYLQGPIWAKIPHTDGHFHPSPLMGGFGLKHPPPQILIKNTPVPANPSTTFSEAKFASFITQYSTGQVSVEIEWELQKENSKRWNPEIQYTSNYNKSVNVDFTVDTNGVYSEPRPIGTRYLTRN

SEQ ID NO: 176 - protein, 739 aa, Adeno-associated virus-2
MAADGYLPDWLEDTLSEGIRQWWKLKPGPPPPKPAERHKDDSRGLVLPGYKYLGPFNGLDKGEPVNEADAAALEHDKAYDRQLDSGDNPYLKYNHADAEFQERLKEDTSFGGNLGRAVFQAKKRVLEPLGLVEEPVKTAPGKKRPVEHSPVEPDSSSGTGKAGQQPARKRLNFGQTGDADSVPDPQPLGQPPAAPSGLGTNTMATGSGAPMADNNEGADGVGNSSGNWHCDSTWMGDRVITTSTRTWALPTYNNHLYKQISSQSGASNDNHYFGYSTPWGYFDFNRFHCHFSPRDWQRLINNNWGFRPKRLNFKLFNIQVKEVTQNDGTTTIANNLTSTVQVFTDSEYQLPYVLGSAHQGCLPPFPADVFMVPQYGYLTLNNGSQAVGRSSFYCLEYFPSQMLRTGNNFTFSYTFEDVPFHSSYAHSQSLDRLMNPLIDQYLYYLSRTNTPSGTTTQSGLQFSQAGASDIRDQSRNWLPGPCYRQQRVSKTSADNNNSEYSWTGATKYHLNGRDSLVNPGPAMASHKDDEEKFFPQSGVLIFGKQGSEKTNVDIEKVMITDEEEIRTTNPVATEQYGSVSTNLQRGNRQAATADVNTQGVLPGMVWQDRDVYLQGPIWAKIPHTDGHFHPSPLMGGFGLKHPPPQILIKNTPVPANPSTTFSAAKFASFITQYSTGQVSVEIEWELQKENSKRWNPEIQYTSNYNKSVNVDFTVDTNGVYSEPRPIGTRYLTRNLLLAA

SEQ ID NO: 177 - protein, 725 aa, Adeno-associated virus-2
MAADGYLPDWLEDTLSEGIRQWWKLKPGPPPPKPAERHKDDSRGLVLPGYKYLGPFNGLDKGEPVNEADAAALEHDKAYDRQLDSGDNPYLKYNHADAEFQERLKEDTSFGGNLGRAVFQAKKRVLEPLGLVEEPVKTAPGKKRPVEHSPVEPDSSSGTGKAGQQPARKRLNFGQTGDADSVPDPQPLGQPPAAPSGLGTNTMATGSGAPMADNNEGADGVGNSSGNWHCDSTWMGDRVITTSTRTWALPTYNNHLYKQISSQSGASNDNHYFGYSTPWGYFDFNRFHCHFSPRDWQRLINNNWGFRPKRLNFKLFNIQVKEVTQNDGTTTIANNLTSTVQVFTDSEYQLPYVLGSAHQGCLPPFPADVFMVPQYGYLTLNNGSQAVGRSSFYCLEYFPSQMLRTGNNFTFSYTFEDVPFHSSYAHSQSLDRLMNPLIDQYLYYLSRTNTPSGTTTQSGLQFSQAGASDIRDQSRNWLPGPCYRQQRVSKTSADNNNSEYSWTGATKYHLNGRDSLVNPGPAMASHKDDEEKFFPQSGVLIFGKQGSEKTNVDIEKVMITDEEEIRTTNPVATEQYGSVSTNLQRGNRQAATADVNTQGVLPGMVWQDRDVYLQGPIWAKIPHTDGHFHPSPLMGGFGLKHPPPQILIKNTPVPANPSTTFSAAKFASFITQYSTGQVSVEIEWELQKENSKRWNPEIQYTSNYNKSVNVDFTVDTNGVYSEPRP

SEQ ID NO: 178 - protein, 707 aa, Adeno-associated virus-2
MAADGYLPDWLEDTLSEGIRQWWKLKPGPPPPKPAERHKDDSRGLVLPGYKYLGPFNGLDKGEPVNEADAAALEHDKAYDRQLDSGDNPYLKYNHADAEFQERLKEDTSFGGNLGRAVFQAKKRVLEPLGLVEEPVKTAPGKKRPVEHSPVEPDSSSGTGKAGQQPARKRLNFGQTGDADSVPDPQPLGQPPAAPSGLGTNTMATGSGAPMADNNEGADGVGNSSGNWHCDSTWMGDRVITTSTRTWALPTYNNHLYKQISSQSGASNDNHYFGYSTPWGYFDFNRFHCHFSPRDWQRLINNNWGFRPKRLNFKLFNIQVKEVTQNDGTTTIANNLTSTVQVFTDSEYQLPYVLGSAHQGCLPPFPADVFMVPQYGYLTLNNGSQAVGRSSFYCLEYFPSQMLRTGNNFTFSYTFEDVPFHSSYAHSQSLDRLMNPLIDQYLYYLSRTNTPSGTTTQSGLQFSQAGASDIRDQSRNWLPGPCYRQQRVSKTSADNNNSEYSWTGATKYHLNGRDSLVNPGPAMASHKDDEEKFFPQSGVLIFGKQGSEKTNVDIEKVMITDEEEIRTTNPVATEQYGSCIYQPPERQQTSSYRRCQHTRRSSRHGLAGQRCVPSGAHLGKDSTHGRTFSPLSPHGWIRTTPSSTDSHQEHPGTCESFDHLQCGKVCFLHHTVLHGTGQRGDRVRAAEGKQQTLESRNSVHFQLQQVC

SEQ ID NO: 179 - protein, 739 aa, Adeno-associated virus-2; identical to SEQ ID NO: 176

SEQ ID NO: 180 - protein, 737 aa, Adeno-associated virus-2
MASDGYLPDWLEDNLSEGIREWWDLKPGAPKPKANQQKQDDGRGLVLPGYKYLGPFNGLDKGEPVNAADAAALEHDKAYDQQLKAGDNPYLRYNHADAEFQERLQEDTSFGGNLGRAVFQAKKRVLEPFGLVEEGAKTAPGKKRPVEQSPQEPDSSSGIGKTGQQPAKKRLNFGQTGDSESVPDPQPLGEPPATPAAVGPTTMASGGGAPMADNNEGADGVGNASGNWHCDSTWLGDRVITTSTRTWALPTYNNHLYKQISSASTGASNDNHYFGYSTPWGYFDFNRFHCHFSPRDWQRLINNNWGFRPKRLNFKLFNIQVKEVTTNDGTTTIANNLTSTVQVFTDSEYQLPYVLGSAHQGCLPPFPADVFMVPQYGYLTLNNGSQAVGRSSFYCLEYFPSQMLRTGNNFTFSYTFEDVPFHSSYAHSQSLDRLMNPLIDQYLYYLSRTNTPSGTTTQSGLQFSQAGASDIRDQSRNWLPGPCYRQQRVSKTSADNNNSEYSWTGATKYHLNGRDSLVNPGPAMASHKDDEEKFFPQSGVLIFGKQGSEKTNVDIEKVMITDEEEIRTTNPVATEQYGSVSTNLQRGNRQAATADVNTQGVLPGMVWQDRDVYLQGPIWAKIPHTDGHFHPSPLMGGFGLKHHPPQILIKNTPVPANPSTTFSAAKFASFITQYSTGQVSVEIEWELQKENSKRWNPEIQYTSNYNKSVNVDFTVDTNGVYSEPRPIGTRYLTRNLL

SEQ ID NO: 181 - protein, 741 aa, Adeno-associated virus-2
MAADGYLPDWLEDTLSEGIREWWALKPGAPKPKANQQKQDDGRGLVLPGYKYLGPFNGLDKGEPVNEADAAALEHDKAYDQQLQAGDNPYLRYNHADAEFQERLQEDTSFGGNLGRAVFQAKKRVLEPLGLVEEPVKTAPGKKRPVEHSPVEPDSSSGTGKSGQQPARKRLNFGQTGDADSVPDPQPLGQPPAAPSGLGTNTMATGSGAPMADNNEGADGVGNSSGNWHCDSTWMGDRVITTSTRTWALPTYNNHLYKQISSQSGASNDNHYFGYSTPWGYFDFNRFHCHFSPRDWQRLINNNWGFRPKRLNFKLFNIQVKEVTQNDGTTTIANNLTSTVQVFTDSEYQLPYVLGSAHQGCLPPFPADVFMVPQYGYLTLNNGSQAVGRSSFYCLEYFPSQMLRTGNNFTFSYTFEDVPFHSSYAHSQSLDRLMNPLIDQYLYYLSRTNTPSGTTTQSGLQFSQAGASDIRDQSRNWLPGPCYRQQRVSKTSADNNNSEYSWTGATKYHLNGRDSLVNPGPAMASHKDDEEKFFPQSGVLIFGKQGSEKTNVDIEKVMITDEEEIRTTNPVATEQYGSVSTNLQRGNLANHNNTTNARQAATADVNTQGVLPGMVWQDRDVYLQGPIWAKIPHTDGHFHPSPLMGGFGLKHPPPQILIKNTPVPANPSTTFSAAKFASFITQYSTGQVSVEIEWELQKENSKRWNPEIQYTSNYNKSINVDFTVDTNGVYSEPRPIGTRYL

SEQ ID NO: 182 - protein, 730 aa, Adeno-associated virus-2
MASDGYLPDWLEDNLSEGIREWWDLKPGAPKPKANQQKQDDGRGLVLPGYKYLGPFNGLDKGEPVNAADAAALEHDKAYDQQLKAGDNPYLRYNHADAEFQERLQEDTSFGGNLGRAVFQAKKRVLEPFGLVEEGAKTAPGKKRPVEQSPQEPDSSSGIGKTGQQPAKKRLNFGQTGDSESVPDPQPLGEPPATPAAVGPTTMASGGGAPMADNNEGADGVGNASGNWHCDSTWLGDRVITTSTRTWALPTYNNHLYKQISSASTGASNDNHYFGYSTPWGYFDFNRFHCHFSPRDWQRLINNNWGFRPKRLNFKLFNIQVKEVTTNDGVTTIANNLTSTVQVFSDSEYQLPYVLGSAHQGCLPPFPADVFMIPQYGYLTLNNGSQAVGRSSFYCLEYFPSQMLRTGNNFTFSYTFEDVPFHSSYAHSQSLDRLMNPLIDQYLYYLNRTQNQSGSAQNNDLLFSRGSPAGMSVQPKNWLPGPCYRQQRVSKTKTDNNNSNFTWTGASKYNLNGRESIINPGTAMASHKDDKDKFFPMSGVMIFGKESAGASNTALDNVMITDEEEIKATNPVATERFGTVAVNLQSSSTDPATGDVHVMGALPGMVWQDRDVYLQGPIWAKIPHTDGHFHPSPLMGGFGLKNPPPQILIKNTPVPANPPAEFSATKFASFITQYSTGQVSVEIEWELQKENSKRWNPEVQYTSNYAKSANVDFTVDNNGLYTEPRPIGTR

SEQ ID NO: 183 - protein, 735 aa, Adeno-associated virus-2
  MOD_RES (239)..(239): Any amino acid
MASDGYLPDWLEDNLSEGIREWWDLKPGAPKPKANQQKQDDGRGLVLPGYKYLGPFNGLDKGEPVNAADAAALEHDKAYDQQLKAGDNPYLRYNHADAEFQERLQEDTSFGGNLGRAVFQAKKRVLEPFGLVEEGAKTAPGKKRPVEQSPQEPDSSSGIGKTGQQPAKKRLNFGQTGDSESVPDPQPLGEPPATPAAVGPTTMASGGGAPMADNNEGADGVGNASGNWHCDSTWLGDRXITTSTRTWALPTYNNHLYKQISSASTGASNDNHYFGYSTPWGYFDFNRFHCHFSPRDWQRLINNNWGFRPKRLNFKLFNIQVKEVTTNDGVTTIANNLTSTVQVFSDSEYQLPYVLGSAHQGCLPPFPADVFMIPQYGYLTLNNGSQAVGRSSFYCLEYFPSQMLRTGNNFTFSYTFEDVPFHSSYAHSQSLDRLMNPLIDQYLYYLNRTQNQSGSAQNNDLLFSRGSPAGMSVQPKNWLPGPCYRQQRVSKTKTDNNNSNFTWTGASKYNLNGRESIINPGTAMASHKDDKDKFFPMSGVMIFGKESAGASNTALDNVMITDEEEIKATNPVATERFGTVAVNLQSSSTDPATGDVHVMGALPGMVWQDRDVYLQGPIWAKIPHTDGHFHPSPLMGGFGLKNPPPQILIKNTPVPANPPAEFSATKFASFITQYSTGQVSVEIEWELQKENSKRWNPEVQYTSNYAKSANVDFTVDNNGLYTEPRPIGTRYLTRP

SEQ ID NO: 184 - protein, 733 aa, Adeno-associated virus-2
MASDGYLPDWLEDNLSEGIREWWDLKPGAPKPKANQQKQDDGRGLVLPGYKYLGPFNGLDKGEPVNAADAAALEHDKAYDQQLKAGDNPYLRYNHADAEFQERLQEDTSFGGNLGRAVFLAKKRVLEPFGLVEEGAKTAPGKKRPVEQSPQEPDSSSGIGKTGQQPAKKRLNFGQTGDSESVPDPQPLGEPPATPAAVGPTTMASGGGAPMADNNEGADGVGNASGNWHCDSTWLGDRVITTSTRTWALPTYNNHLYKQISSASTGASNDNHYFGYSTPWGYFDFNRFHCHFSPRDWQRLINNNWGFRPKRLNFKLFNIQVKEVTTNDGVTTIANNLTSTVQVFSDSEYQLPYVLGSAHQGCLPPFPADVFMIPQYGYLTLNNGSQAVGRSSFYCLEYFPSQMLRTGNNFTFSYTFEDVPFHSSYAHSQSLDRLMNPLIDQYLYYLNRTQNQSGSAQNNDLLFSRGSPAGMSVQPKNWLPGPCYRQQRVSKTKTDNNNSNFTWTGASKYNLNGRESIINPGTAMASHKDDKDKFFPMSGVMIFGKESAGASNTALDNVMITDEEEIKATNPVATERFGTVAVNLQSSSTDPATGDVHVMGALPGMVWQDRDVYLQGPIWAKIPHTDGHFHPSPLMGGFGLKNPPPQILIKNTPVPANPPAEFSATKFASFITQYSTGQVSVEIEWELQKENSKRWNPEVQYTSNYAKSANVDFTVDNNGLYTEPRPIGTRYLT

SEQ ID NO: 185 - protein, 734 aa, Adeno-associated virus-2
MAADGYLPDWLEDTLSEGIRQWWKLKPGPPPPKPAERHKDDSRGLVLPGCKYLGPFNGLDKGEPVNEADAAALEHDKAYDRQLDSGDNPYLKYNHADAEFQERLKEDTSFGGNLGRAVFQAKKRVLEPLGLVEEPVKTAPGKKRPVEHSPVEPDSSSGTGKAGQQPARKRLNFGQTGDADSVPDPQPLGQPPAAPSGLGTNTMATGSGAPMADNNEGADGVGNSSGNWHCDSTWMGDRVITTSTRTWALPTYNNHLYKQISSQSGASNDNHYFGYSTPWGYFDFNRFHCHFSPRDWQRLINNNWGFRPKRLNFKLFNIQVKEVTQNDGTTTIANNLTSTVQVFSDSEYQLPYVLGSAHQGCLPPFPADVFMIPQYGYLTLNNGSQAVGRSSFYCLEYFPSQMLRTGNNFTFNYTFEDVPFHSSYAHSQSLDRLMNPLIDQYLYYLNRTQNQSGSAQNNDLLFSRGSPAGMSVQPKNWLPGPCYRQQRVSKTKTDNNNSNFTWTGASKYNLNGRESIINPGTAMASHKDDKDKFFPMSGVMIFGKESAGASNTALDNVMITDEEEIKATNPVATERFGTVAVNLQSSSTDPATGDVHVMGALPGMVWQDRDVYLQGPIWAKIPHTDGHFHPSPLMGGFGLKNPPPQILIKNTPVPANPPAEFSATKFASFITQYSTGQVSVEIEWELQKENSKRWNPEVQYTSNYAKSANVDFTVDNNGLYTEPRPIGTRYLTRP

SEQ ID NO: 186 - protein, 734 aa, Adeno-associated virus-2
MAADGYLPDWLEDTLSEGIRQWWKLKPGPPPPKPAERHKDDSRGLVLPGYKYLGPFNGLDKGEPVNEADAAALEHDKAYDRQLDSGDNPYLKYNHADAEFQERLKEDTSFGGNLGRAVFQAKKRVLEPLGLVEEPVKTAPGKKRPVEHSPVEPDSSSGTGKAGQQPARKRLNFGQTGDADSVPDPQPLGQPPAAPSGLGTNTMATGSGAPMADNNEGADGVGNSSGNWHCDSTWMGDRVITTSTRTWALSTYNNHLYKQISSQSGASNDNHYFGYSTPWGYFDFNRFHCHFSPRDWQRLINNNWGFRPKRLNFKLFNIQVKEVTQNDGTTTIANNLTSTVQVFTDSEYQLPYVLGSAHQGCLPPFPADVFMVPQYGYLTLNNGSQAVGRSSFYCLEYFPSQMLRTGNNFTFSYTFEDVPFHSSYAHSQSLDRLMNPLIDQYLYYLSRTNTPSGTTTQSRLQFSQAGASDIRDQSRNWLPGPCYRQQRVSKTSADNNNSEYSWTGATKYHLNGRDSLVNPGPAMASHKDDEEKFFPQSGVLIFGKQGSEKTNVDIEKVMITDEEEIRTTNPVATEQYGSVSTNLQRGNRQAATADVNTQGVLPGMVWQDRDVYLQGPIWAKIPHTDGHFHPSPLMGGFGLKHPPPQILIKNTPVPANPSTTFSAAKFASFITQYSTGQVSVEIEWELQKENSKRWNPEIQYTSNYNKSINVDFTVDTNGVYSEPRPIGTRYLTRN

SEQ ID NO: 187 - protein, 738 aa, Adeno-associated virus-2
MAADGYLPDWLEDTLSEGIRQWWKLKPGPPPPKPAERHKDDSRGLVLPGYKYLGPFNGLDKGEPVNEADAAALEHDKAYDRQLDGGDNPYLKYNHADAEFQERLKEDTSFGGNLGRAVFQAKKRVLEPLGLVEEPVKTAPGKKRPVEHSPVEPDSSSGTGKAGQQPARKRLNFGQTGDADSVPDPQPLGQPPAAPSGLGTNTMATGSGAPMADNNEGADGVGNSSGNWHCDSTWMGDRVITTSTRTWALPTYNNHLYKQISSQSGASNDNHYFGYSTPWGYFDFNRFHCHFSPRDWQRLINNNWGFRPKRLNFKLFNIQVKEVTQNDGTTTIANNLTSTVQVFTDSEYQLPYVLGSAHQGCLPPFPADVFMVPQYGYLTLNNGSQAVGRSSFYCLEYFPSQMLRTGNNFTFSYTFEDVPFHSSYAHSQSLDRLMNPLIDQYLYYLSRTNTPSGTTTQSGLQFSQAGASDIRDQSRNWLPGPCYRQQRVSKTSADNNNSEYSWTGATKYHLNGRDSLVNPGPAMASHKDDEEKFFPQSGVLIFGKQGSEKTNVDIEKVMITDEEEIRTTNPVATEQYGSVSTNLQRGNRQAATADVNTQGVLPGMVWQDRDVYLQGPIWAKIPHTDGHFHPSPLMGGFGLKHPPPQILIKNTPVPANPSTTFSAAKFASFITQYSTGQVSVEIEWELQKENSKRWNPEIQYTSNYNKSVNVDFTVDTNGVYSEPRPIGTRYLTRNLLRP

SEQ ID NO: 188 - DNA, 2208 bp, Artificial Sequence
  Description of Artificial Sequence: Synthetic polynucleotide
atggctgccgatggttatcttccagattggctcgaggacactctctctgaaggaataagacagtggtggaagctcaaacctggcccaccaccaccaaagcccgcagagcggcataaggacgacagcaggggtcttgtgcttcctgggtacaagtacctcggacccttcaacggactcgacaagggggagccggtcaacgaggcagacgccgcggccctcgagcacgacaaggcctacgaccggcagctcgacagcggagacaacccgtacctcaagtacaaccacgccgacgcagagtttcaggagcgccttaaagaagatacgtcttttgggggcaacctcggacgagcagtcttccaggcgaaaaagagggttcttgaacctctgggcctggttgaggaacctgttaagacggctccgggaaaaaagaggccggtagagcactctcctgtggagccagactcctcctcgggaaccggaaaagcgggccagcagcctgcaagaaaaagattaaattttggtcagactggagacgcagactccgtacctgacccccagcctctcggacagccaccagcagccccctctggtctgggatctactacaatggctacaggcagtggcgcaccaatggcagacaataacgagggtgccgatggagtgggtaattcctcaggaaattggcattgcgattcccaatggctgggcgacagagtcatcaccaccagcacccgaacctgggccctgcccacatacaacaaccacctctacaagcaaatctccagccaatcaggagccagcaacgacaaccactactttggctacagcaccccctgggggtattttgacttcaacagattccactgccacttttcaccacgtgactggcaaagactcatcaacaacaactggggattccggcccaaaagactcaacttcaagctctttaatattcaagtcaaagaggtcacgcagaatggcggtacgacgacgattgccaataaccttaccagcacggttcaggtgtttactgactcggagtaccagctcccgtacgtcctgggctcggcgcatcaaggatgcctcccgccgtttccagcggacgtcttcatggtcccacagtatggatacctcaccctgaacaacgggagtcaggcggtaggacgctcttccttttactgcctggagtactttccttctcagatgctgcgtactggaaacaactttcagttcagctacacttttgaagacgtgcctttccacagcagctacgctcacagccagagtctggatcggctgatgaatcctctgatcgaccagtacctgtattatctgaacaagacacaaacaaatagtggaactcttcagcagtctcggctactgtttagccaagctggaccaaccaacatgtctcttcaagctaaaaactggctgcctggaccttgctacagacagcagcgtctgtcaaaacaggcaaacggcaacaacaacagcaactttccctggactgcagctacaaagtatcatctaaatggccgggactcgttggttaatccaggaccagctatggccagtcacaaggatgacgaagaaaagtttttccccatgcatggaaccctgatatttggtaaacaaggaacaaatgccaacgacgcggatttggaaaatgtcatgattacagatgaagaagaaatcagggccaccaatcccgtggctacggagcagtacgggactgtgtcaaataatttgcaaaactcaaacactggtccaactactggaactgtcaatcaccaaggagcgttacctggtatggtgtggcaggatcgagacgtgtacctgcagggacccatttgggccaagattcctcacaccgatggacactttcatccttctccactgacgggaggttttggactcaaacacccgcctcctcagatcatgatcaaaaacactcccgttccagccaatcctcccacaaacttcagttctgccaagtttgcttctttcatcacacagtattccacgggacaggtcagcgtggagatcgagtgggagctgcagaaggagaacagcaaacgctggaatcccgaaattcagtacacttccaactacaacaagtctgttaatgtggactttactgtggacactaatggtgtgtattcagagcctcgccccattggcaccagatacctgactcgtaatctgtaa

SEQ ID NO: 189 - protein, 735 aa, Artificial Sequence
  Description of Artificial Sequence: Synthetic polypeptide
MAADGYLPDWLEDTLSEGIRQWWKLKPGPPPPKPAERHKDDSRGLVLPGYKYLGPFNGLDKGEPVNEADAAALEHDKAYDRQLDSGDNPYLKYNHADAEFQERLKEDTSFGGNLGRAVFQAKKRVLEPLGLVEEPVKTAPGKKRPVEHSPVEPDSSSGTGKAGQQPARKRLNFGQTGDADSVPDPQPLGQPPAAPSGLGSTTMATGSGAPMADNNEGADGVGNSSGNWHCDSQWLGDRVITTSTRTWALPTYNNHLYKQISSQSGASNDNHYFGYSTPWGYFDFNRFHCHFSPRDWQRLINNNWGFRPKRLNFKLFNIQVKEVTQNGGTTTIANNLTSTVQVFTDSEYQLPYVLGSAHQGCLPPFPADVFMVPQYGYLTLNNGSQAVGRSSFYCLEYFPSQMLRTGNNFQFSYTFEDVPFHSSYAHSQSLDRLMNPLIDQYLYYLNKTQTNSGTLQQSRLLFSQAGPTNMSLQAKNWLPGPCYRQQRLSKQANGNNNSNFPWTAATKYHLNGRDSLVNPGPAMASHKDDEEKFFPMHGTLIFGKQGTNANDADLENVMITDEEEIRATNPVATEQYGTVSNNLQNSNTGPTTGTVNHQGALPGMVWQDRDVYLQGPIWAKIPHTDGHFHPSPLTGGFGLKHPPPQIMIKNTPVPANPPTNFSSAKFASFITQYSTGQVSVEIEWELQKENSKRWNPEIQYTSNYNKSVNVDFTVDTNGVYSEPRPIGTRYLTRNL

SEQ ID NO: 190 - DNA, 2208 bp, Artificial Sequence
  Description of Artificial Sequence: Synthetic polynucleotide
atggctgccgatggttatcttccagattggctcgaggacactctctctgaaggaataagacagtggtggaagctcaaacctggcccaccaccaccaaagctcgcagagcggcatcaggacgacagcaggggtcttgtgcttcctgggtacaagtacctcggacccttcaacggactcgacaaaggagagccggtcaacgaggcagacgccgcggccctcgagcacgacaaggcctacgaccggcagctcgacagcggagacaacccgtacctcaagtacaaccacgccgacgcggagtttcaggagcgtcttaaagaagatacgtcttttgggggcaacctcggacgagcagtcttccaggcgaaaaagagggttcttgaacctctgggcctggttgaggaacctgttaagacggctccgggaaaaaagaggccggtagagcactctcctgtggagccagactcctcctcgggaaccggaaaggcgggccatcagcctgcgagaaagagattgaattttggtcagactggagacgcagactccgtacctgacccccagcctctcggacagccaccagcagcccccacaagtctgggatctactacaatggctacaggcagtggcgcaccaatggcagacaataacgagggtgccgatggagtgggtaattcctcaggaaattggcattgcgattcccaatggctgggcgacagagtcatcaccaccagcacccgaacctgggccctgcccacctacaacaaccacctctacaagcaaatctccagccaatcaggagcctcgaacgacaaccactactttggctacagcaccccctgggggtattttgacttcaacagattccactgtcacttctccccacgtgattggcaaagactcatcaacaacaactggggattccgacccaagagactcaacttcaagctctttaacattcaagtcaaagaggtcacgcagaatgacggtacgacgacgattgccaataaccttaccagcacggttcaggtgtttactgactcggagtaccagctcccgtacgtcctcggctcggcgcatcaaggatgcctcccgccgtttccagcggacgtcttcacggtcccacagtatggatacctcaccctgaacaacgggagtcaggcggtaggacgctcttccttttactgcctggagtactttccttctcagatgctgcgtactggaaacaaccttaccttcagctacacctttgaggacgttcctttccacagcagctacgctcacagccagagtttggaccggctgatgaatcctctgatcgaccagtatctatattatctgaacaggacacaatcaaatagtggaactcttcagcagtctaggctactgtttagccaagctggacccaccagcatgtctcttcaagctaaaaactggctgcctggaccttgctacagacagcagcgtctttcaaagcaggcaaacgacaacaacaacagcaactttccctggactgcggctacaaagtatcatctaaatggccgggactcgttggttaatccaggaccagctatggccagccacaaagacgatgaagaaaagtttttccccatgcatggaaccctgatatttggtaaacaaggaacaaatgctaacgacgcggatttggagcatgttatgattacagatgaagaagaaatcaggaccaccaatcctgtggctacagagcagtacggaaacgtgtcaaataatttgcaaaactcaaatactggtccaactacagaaaatgtcaatcaccagggagcgttacctggtatggtgtggcaggatcgagacgtgtacctgcagggacccatttgggccaagattcctcacaccgacggacactttcacccttctccactgatgggaggttttggactcaaacacccgcctcctcaaatcatgatcaaaaacactcccgttccagccaatcctcccacaaactacagttctgccaagtttgcttctttcatcacacagtattccacgggccaggtcagcgtggagattgagtgggagctgcggaaggagaacagcaaacgctggaaccccgagatccagtatacttccaactacaacaaatctgttaatgtggactttactgtggacactaatggtgtgtattcagagcctcgccccattggcaccagatacctgactcgtaatctgtaa

SEQ ID NO: 191 - protein, 735 aa, Artificial Sequence
  Description of Artificial Sequence: Synthetic polypeptide
MAADGYLPDWLEDTLSEGIRQWWKLKPGPPPPKLAERHQDDSRGLVLPGYKYLGPFNGLDKGEPVNEADAAALEHDKAYDRQLDSGDNPYLKYNHADAEFQERLKEDTSFGGNLGRAVFQAKKRVLEPLGLVEEPVKTAPGKKRPVEHSPVEPDSSSGTGKAGHQPARKRLNFGQTGDADSVPDPQPLGQPPAAPTSLGSTTMATGSGAPMADNNEGADGVGNSSGNWHCDSQWLGDRVITTSTRTWALPTYNNHLYKQISSQSGASNDNHYFGYSTPWGYFDFNRFHCHFSPRDWQRLINNNWGFRPKRLNFKLFNIQVKEVTQNDGTTTIANNLTSTVQVFTDSEYQLPYVLGSAHQGCLPPFPADVFTVPQYGYLTLNNGSQAVGRSSFYCLEYFPSQMLRTGNNLTFSYTFEDVPFHSSYAHSQSLDRLMNPLIDQYLYYLNRTQSNSGTLQQSRLLFSQAGPTSMSLQAKNWLPGPCYRQQRLSKQANDNNNSNFPWTAATKYHLNGRDSLVNPGPAMASHKDDEEKFFPMHGTLIFGKQGTNANDADLEHVMITDEEEIRTTNPVATEQYGNVSNNLQNSNTGPTTENVNHQGALPGMVWQDRDVYLQGPIWAKIPHTDGHFHPSPLMGGFGLKHPPPQIMIKNTPVPANPPTNYSSAKFASFITQYSTGQVSVEIEWELRKENSKRWNPEIQYTSNYNKSVNVDFTVDTNGVYSEPRPIGTRYLTRNL

SEQ ID NO: 192 - DNA, 2208 bp, Artificial Sequence
  Description of Artificial Sequence: Synthetic polynucleotide
atggctgccgatggttatcttccagattggctcgaggacactctctctgaaggaataagacagtggtggaagctcaaacctggcccaccaccaccaaagcccgcagagcggcatcaggacgacagcaggggtcttgtgcttcctgggtacaagtacctcggacccttcaacggactcgacaaaggagagccggtcaacgaggcagacgccgcggccctcgagcacgacaaggcctacgaccggcagctcgacagcggagacaacccgtacctcaagtacaaccacgccgacgcggagtttcaggagcgtcttaaagaagatacgtcttttgggggcaacctcggacgagcagtcttccaggcgaaaaagagggttcttgaacctctgggcctggttgaggaacctgttaagacggctccgggaaaaaagaggccggtagagcactctcctgtggagccagactcctcctcgggaaccggaaaagcgggccatcagcctgcgagaaagagattgaattttggtcagactggagacgcagactccgtacctgacccccagcctctcggacagccaccagcagcccccacaagtttgggatctactacaatggctacaggcagtggcgcaccaatggcagacaataacgagggtgccgatggagtgggtaattcctcaggaaattggcattgcgattcccaatggctgggcgacagagtcatcaccaccagcacccgaacctgggccctgcccacctacaacaaccacctctacaagcaaatctccagccaatcaggagcctcgaacgacaaccactactttggctacagcaccccctgggggtattttgacttcaacagattccactgtcacttctccccacgtgattggcaaagactcatcaacaacaactggggattccgacccaagagactcaacttcaagctctttaacattcaagtcaaggaggtcacgcagaatgacggtacgacgacgattgccaataaccttaccagcacggttcaggtgtttactgactcggagtaccagctcccgtacgtcctcggctcggcgcatcaaggatgcctcccgccgtttccagcggacgtcttcatggtcccacagtatggatacctcaccctgaacaacgggagtcaggcggtaggacgctcttccttttactgcctggagtactttccttctcagatgctgcgtactggaaacaactttaccttcagctacacctttgaggacgttcctttccacagcagctacgctcacagccagagtttggaccggctgatgaatcctctgatcgaccagtatctatattatctgaacaggacacaatcaaatagtggaactcttcagcagtctaggctactgtttagccaagctggacccaccagcatgtctcttcaagctaaaaactggctgcctggaccttgctacagacagcagcgtctttcaaagcaggcaaacgacaacaacaacagcaactttccctggactgcggctacaaagtatcgtctaaatggccgggactcgttggttaatccaggaccagctatggccagccacaaagacgatgaagaaaagtttttccccatgcatggaaccctgatatttggtaaacaaggaacaaatgctaacgacgcggatttggagcatgttatgattacagatgaagaagaaatcaggaccaccaatcctgtggctacagagcagtacggaaacgtgtcaaataatttgcaaaactcaaatactggtccaactacagaaaatgtcaatcaccagggagcgttacctggtatggtgtggcaggatcgagacgtgtacctgcagggacccatttgggccaagattcctcacaccgacggacactttcacccttctccactgatgggaggttttggactcaaacacccgcctcctcaaatcatgatcaaaaacactcccgttccagccaatcctcccacaaacttcagttctgccaagtttgcttctttcatcacacagtattccacgggccaggtcagcgtggagattgagtgggagctgcagaaggagaacagcaaacgctggaaccccgagatccagtatacttccaactacaacaaatctgttaatgtggactttactgtggacactaatggtgtgtattcagagcctcgccccattggcaccagatacctgactcgtaatctgtaa

SEQ ID NO: 193 - protein, 735 aa, Artificial Sequence
  Description of Artificial Sequence: Synthetic polypeptide
MAADGYLPDWLEDTLSEGIRQWWKLKPGPPPPKPAERHQDDSRGLVLPGYKYLGPFNGLDKGEPVNEADAAALEHDKAYDRQLDSGDNPYLKYNHADAEFQERLKEDTSFGGNLGRAVFQAKKRVLEPLGLVEEPVKTAPGKKRPVEHSPVEPDSSSGTGKAGHQPARKRLNFGQTGDADSVPDPQPLGQPPAAPTSLGSTTMATGSGAPMADNNEGADGVGNSSGNWHCDSQWLGDRVITTSTRTWALPTYNNHLYKQISSQSGASNDNHYFGYSTPWGYFDFNRFHCHFSPRDWQRLINNNWGFRPKRLNFKLFNIQVKEVTQNDGTTTIANNLTSTVQVFTDSEYQLPYVLGSAHQGCLPPFPADVFMVPQYGYLTLNNGSQAVGRSSFYCLEYFPSQMLRTGNNFTFSYTFEDVPFHSSYAHSQSLDRLMNPLIDQYLYYLNRTQSNSGTLQQSRLLFSQAGPTSMSLQAKNWLPGPCYRQQRLSKQANDNNNSNFPWTAATKYRLNGRDSLVNPGPAMASHKDDEEKFFPMHGTLIFGKQGTNANDADLEHVMITDEEEIRTTNPVATEQYGNVSNNLQNSNTGPTTENVNHQGALPGMVWQDRDVYLQGPIWAKIPHTDGHFHPSPLMGGFGLKHPPPQIMIKNTPVPANPPTNFSSAKFASFITQYSTGQVSVEIEWELQKENSKRWNPEIQYTSNYNKSVNVDFTVDTNGVYSEPRPIGTRYLTRNL

SEQ ID NO: 194 - DNA, 2208 bp, Artificial Sequence
  Description of Artificial Sequence: Synthetic polynucleotide
atggctgccgatggttatcttccagattggctcgaggacactctctctgaaggaataagacagtggtggaagctcaaacctggcccaccaccaccaaagcccgcagagcggcatcaggacgacagcaggggtcttgtgcttcctgggtacaagtacctcggacccttcaacggactcgacaaaggagagccggtcaacgaggcagacgccgcggccctcgagcacgacaaggcctacgaccggcagctcgacagcggagacaacccgtacctcaagtacaaccacgccgacgcggagtttcaggagcgtcttaaagaagatacgtcttttgggggcaacctcggacgagcagtcttccaggcgaaaaagagggttcttgaacctctgggcctggttgaggaacctgttaagacggctccgggaaaaaagaggccggtagagcactctcctgtggagccagactcctcctcgggaaccggaaaagcgggccatcagcctgcgagaaagagattgaattttggtcagactggagacgcagactccgtacctgacccccagcctctcggacagccaccagcagcccccacaagtttgggatctactacaatggctacaggcagtggcgcaccaatggcagacaataacgagggtgccgatggagtgggtaattcctcaggaaattggcattgcgattcccaatggctgggcgacagagtcatcaccaccagcacccgaacctgggccctgcccacctacaacaaccacctctacaagcaaatctccagccaatcaggagcctcgaacgacaaccactactttggctacagcaccccctgggggtattttgacttcaacagattccactgtcacttctccccacgtgattggcaaagactcatcaacaacaactggggattccgacccaagagactcaacttcaagctctttaacattcaagtcaaagaggtcacgcagaatgacggtacgacgacgattgccaataaccttaccagcacggttcaggtgtttactgactcggagtaccagctcccgtacgtcctcggctcggcgcatcaaggatgcctcccgccgtttccagcggacgtcttcatggtcccacagtatggatacctcaccctgaacaacgggagtcaggcggtaggacgcccttccttttactgcctggagtactttccttctcagatgctgcgtactggaaacaactttaccttcagctacacctttgaggacgttcctttccacagcagctacgctcacagccagagtttggaccggctgatgaatcctctgatcgaccagtatctatattatctgaacaggacacaatcaaatagtggaactcttcagcagtctaggctactgtttagccaagctggacccaccagcatgtctcttcaagctaaaaactggctgcctggaccttgctacagacagcagcgtctttcaaagcaggcaaacgacaacaacaacagcaactttccctggactgcggctacaaagtatcatctaaatggccgggactcgttggttaatccaggaccagctatggccagccacaaagacgatgaagaaaagtttttccccatgcatgggaccctgatatttggtaaacaaggaacaaatgctaacgacgcggatttggagcatgttatgattacagatgaagaagaaatcaggaccaccaatcctgtggctacagagcagtacggaaacgtgtcaaataatttgcaaaactcaaatactggtccaactacagaaaatgtcaatcaccagggagcgttacctggtatggtgtggcaggatcgagacgtgtacctgcagggacccatttgggccaagattcctcacaccgacggacactttcacccttctccactgatgggaggttttggactcaaacacccgcctcctcaaatcatgatcaaaaacactcccgttccagccaatcctcccacaaacttcagttctgccaagtttgcttctttcatcacacagtattccacgggccaggtcagcgtggagattgagtgggagctgcagaaggagaacagcaaacgctggaaccccgagatccagtatacttccaactacaacaaatctgttaatgtggactttactgtggacactaatggtgtgtattcagagcctcgccccattggcaccagatacctgactcgtaatctgtaa

SEQ ID NO: 195 - protein, 735 aa, Artificial Sequence
  Description of Artificial Sequence: Synthetic polypeptide
MAADGYLPDWLEDTLSEGIRQWWKLKPGPPPPKPAERHQDDSRGLVLPGYKYLGPFNGLDKGEPVNEADAAALEHDKAYDRQLDSGDNPYLKYNHADAEFQERLKEDTSFGGNLGRAVFQAKKRVLEPLGLVEEPVKTAPGKKRPVEHSPVEPDSSSGTGKAGHQPARKRLNFGQTGDADSVPDPQPLGQPPAAPTSLGSTTMATGSGAPMADNNEGADGVGNSSGNWHCDSQWLGDRVITTSTRTWALPTYNNHLYKQISSQSGASNDNHYFGYSTPWGYFDFNRFHCHFSPRDWQRLINNNWGFRPKRLNFKLFNIQVKEVTQNDGTTTIANNLTSTVQVFTDSEYQLPYVLGSAHQGCLPPFPADVFMVPQYGYLTLNNGSQAVGRPSFYCLEYFPSQMLRTGNNFTFSYTFEDVPFHSSYAHSQSLDRLMNPLIDQYLYYLNRTQSNSGTLQQSRLLFSQAGPTSMSLQAKNWLPGPCYRQQRLSKQANDNNNSNFPWTAATKYHLNGRDSLVNPGPAMASHKDDEEKFFPMHGTLIFGKQGTNANDADLEHVMITDEEEIRTTNPVATEQYGNVSNNLQNSNTGPTTENVNHQGALPGMVWQDRDVYLQGPIWAKIPHTDGHFHPSPLMGGFGLKHPPPQIMIKNTPVPANPPTNFSSAKFASFITQYSTGQVSVEIEWELQKENSKRWNPEIQYTSNYNKSVNVDFTVDTNGVYSEPRPIGTRYLTRNL

SEQ ID NO: 196 - DNA, 2208 bp, Artificial Sequence
  Description of Artificial Sequence: Synthetic polynucleotide
atggctgccgatggttatcttccagattggctcgaggacactctctctgaaggaataagacagtggtggaagctcaaacctggcccaccaccaccaaagcccgcagagcggcataaggacgacagcaggggtcttgtgcttcctgggtacaagtacctcggacccttcaacggactcgacaagggagagccggtcaacgaggcagacgccgcggccctcgagcacgacaaggcctacgaccggcagctcgacagcggagacaacccgtacctcaagtacaaccacgccgacgcggagtttcaggagcgccttaaagaagatacgtcttttgggggcaacctcggacgagcagtcttccaggcaaaaaagagggttcttgaacctctgggcctggttgaggagcctgttaaaacggctccgggaaaaaagaggccggtagagcactctcctgcggagccagactcctcctcgggaaccggaaaagcgggccagcagcctgcaagaaaaagattgaatttcggtcagactggagacgcagactccgtacctgacccccagcctctcggacagccaccagcagccccctctggtctgggaactaatacgatggcttcaggcagtggcgcaccaatggcagacaataacgagggcgccgacggagtgggtaattcctcgggaaattggcattgcgattccacatggatgggcgacagagtcatcaccaccagcacccgaacttgggccctgcccacctacaacaaccatctctacaagcaaatctccagccaatcaggagccagcaacgacaaccactactttggctacagcaccccttgggggtattttgacttcaacagattccactgccacttttcaccacgtgactggcaaagactcatcaacaacaactggggattccggcccaagagactcaacttcaagctctttaacattcaagtcaaagaggtcacgcagaatgacggtacgacgacgattgccaataaccttaccagcacggttcaggtgtttactgactcggagtaccagctcccgtacgtcctcggctcggcgcatcaaggatgcctcccgccgttcccagcagacgtcttcatggtgccacagtatggatacctcaccctgaacaacgggagtcaggcagtaggacgctcttcattttactgcctggagtactttccttctcagatgctgcgtaccggaaacaactttaccttcagctacacctttgaggacgttcctttccacagcagctacgctcacagccagagtttggaccgtctcatgaatcctctcatcgaccagtacctgtattacttgagcagaacaaacactccaagcggaaccaccacgcagtccaggcttcagttttctcaggccggagcaagtgacattcgggaccagtctaggaactggcttcctggaccctgttaccgccagcagcgagtatcaaagacatctgcggataacaacaacagtgaatactcgtggactggagctaccaagtaccacctcaatggcagagactctctggtgaatccgggcccggccatggccagccacaaggacgatgaagaaaagttttttcctcagagcggggttctcatctttgggaagcaaggctcagagaaaacaaatgtggacattgaaaaggtcatgattacagacgaagaggaaatcaggaccaccaatcccgtggctacggagcagtatggttctgtatctaccaacctgcagggcggcaacacacaagcagctaccgcagatgtcaacacacaaggcgttcttccaggcatggtctggcaggacagagacgtgtacctgcaggggcccatctgggcaaagattccacacacggacggacattttcacccctctcccctcatgggcggattcggacttaaacaccctcctccacagattctcatcaagaacaccccggtacctgcgaatccttcgaccaccttcagtgcggcaaagtttgcttctttcatcacacagtattccacggggcaggtcagcgtggagatcgagtgggagctgcagaaggagaacagcaaacgctggaatcccgagatccagtacacttccaactacaacaaatctgttaatgtggactttactgttgacactaatggcgtgtattcagagcctcgccccattggcaccagatacctgactcgtaatctgtaa

SEQ ID NO: 197 - protein, 735 aa, Artificial Sequence
  Description of Artificial Sequence: Synthetic polypeptide
MAADGYLPDWLEDTLSEGIRQWWKLKPGPPPPKPAERHKDDSRGLVLPGYKYLGPFNGLDKGEPVNEADAAALEHDKAYDRQLDSGDNPYLKYNHADAEFQERLKEDTSFGGNLGRAVFQAKKRVLEPLGLVEEPVKTAPGKKRPVEHSPAEPDSSSGTGKAGQQPARKRLNFGQTGDADSVPDPQPLGQPPAAPSGLGTNTMASGSGAPMADNNEGADGVGNSSGNWHCDSTWMGDRVITTSTRTWALPTYNNHLYKQISSQSGASNDNHYFGYSTPWGYFDFNRFHCHFSPRDWQRLINNNWGFRPKRLNFKLFNIQVKEVTQNDGTTTIANNLTSTVQVFTDSEYQLPYVLGSAHQGCLPPFPADVFMVPQYGYLTLNNGSQAVGRSSFYCLEYFPSQMLRTGNNFTFSYTFEDVPFHSSYAHSQSLDRLMNPLIDQYLYYLSRTNTPSGTTTQSRLQFSQAGASDIRDQSRNWLPGPCYRQQRVSKTSADNNNSEYSWTGATKYHLNGRDSLVNPGPAMASHKDDEEKFFPQSGVLIFGKQGSEKTNVDIEKVMITDEEEIRTTNPVATEQYGSVSTNLQGGNTQAATADVNTQGVLPGMVWQDRDVYLQGPIWAKIPHTDGHFHPSPLMGGFGLKHPPPQILIKNTPVPANPSTTFSAAKFASFITQYSTGQVSVEIEWELQKENSKRWNPEIQYTSNYNKSVNVDFTVDTNGVYSEPRPIGTRYLTRNL

SEQ ID NO: 198 - DNA, 3161 bp, Artificial Sequence
  Description of Artificial Sequence: Synthetic polynucleotide
gattgaatttagcggccgcgaattcgcccttgctgcgtcaactggaccaatgagaactttccattcaatgattgcgtcgacaagatggtgatctggtgggaggagggaaagatgaccgccaaggtcatggagtcggccaaagccattctcggaggaagcaaggtgcgcgtggaccagaaatgtaagtcctcggcccagatagacccgactcccgtgattgtcacctccaacaccaacatgtgcgccgtgattgacgggaactcaacgaccttcgagcaccagcagccgttgcaagaccggatgttcaaatttgaactcacccgccgtctggatcatgactttgggaaggtcaccaagcaggaagtcaaagactttttccggtgggcaaaggatcacgtggttgaggtggagcatgaattctacgtcaaaaagggtggagccaagaaaagacccgcccccagtgacgcagatataagtgagcccaaacgggcgcgcgggtcagttgcgcagccatcgacgtcagacgcggaagcttcgatcaactacgcggacaggtaccaaaacaaatgttctcgtcacgtgggcatgaatctgatgctgtttccctgcagacaatgcgagagaatgaatcaaaattcaaatatctgcttcactcacggacagaaggactgtttagagtgctttcccgtgtcagaatctcaacccgtttctgtcgtcaaaaaggcgtatcagaaactttgctacattcatcatatcatgggaaaggtgccagacgcttgcactgcctgcgatctggtcaatgtggatttggatgactgcatctctgaacaataaatgatttaaatcaggtatggctgccgatggttatcttccagattggctcaaggacactctctctgaaggaataagacagtggtggaagctcaaacctggcccaccaccaccaaagcccgcagagcggcataaggacgacagcgggggtcttgtgcttcctgggtacaagtacctcggacccttcaacggactcgacaagggagagccggtcaacgaggcagacgccgcggccctcgagtacgacaaggcctacgaccggcagctcgacagcggagacaacccgtacctcaagtacaaccacgccgacgcggagtttcaggagcgccttaaagaagatacgtcttttgggggcaacctcggacgagcagtcttccaggcgaaaaagagggttcttgaacctctgggcctggttgaggaacctgttaagacggctccgggaaaaaagaggccggtagagcactctcctgtggagccagactcctcctcgggaacaggaaaagcgggccagcagcctgcgagaaagagattgaattttggtcagactggagacgcagactccgtacctgacccccagcctctcggacagccaccagcagccccctctggtctgggaactaatacgatggctacaggcagtggcgcaccaatggcagacaataacgagggcgccgacggagtgggtaattcctcgggaagttggcattgcgattccacatggatgggcgacagagtcatcaccaccagcacccgaacctgggctctgcccacctacaacaaccatctgtacaagcagatctccagccaatcaggagccagcaacgacaaccactactttggctacagcaccccttgggggtattttgacttcaacagattccactgccacttttcaccacgtgactggcaaagactcatcaacaacaactggggattccggcccaagagactcaacttcaagctctttaacattcaagtcaaggaggtcacgcagaatgacggtacgacgacgattgccaataaccttaccagcacggttcaggtgtttactgactcggagtaccagctcccgtacgtccccggctcggcgcatcaaggatgcctcccgccgttcccagcagacgtcttcatggtgccacagtatggatacctcaccctgaacaacgggagtcaggcagtaggacgctcttcattttactgcctggagtactttccttctcagatgcttcgtaccggaaacaactttaccttcagctacacctttgaggatgttcctttccacagcagctacgctcacagccagagtttggaccgtctcatgaatcctctcatcgaccagtacctgtattacttgagcagaacaaacactccaagcggaaccaccacgcagtccaggcttcagttttctcaggccggagcaagtgacattcgggaccagtctaggaactggcttcctggaccctgttaccgccagcagcgagtatcaaagacagctgcggacaacaacaacagtgaatactcgtggactggagctaccaagtaccacctcaatggcagagactctctggtgaatccgggcccggccatggccagccacaaggacgatgaagaaaagttttttcctcaaagcggggttctcatctttgggaagcaaggctcagagaaaacaaatgtggacattgaaaaggtcatgattacagacgaagaggaaatcagaaccaccaatcccgtggccacggagcagtatggttctgtatctaccaacctccagagcggcaacacacaagcagctactgcagatgtcaacacacaaggcgttcttccaggcatggtctggcaggacagagacgtgcacctgcaggggcctatctgggcaaagattccacacacggacggacattttcacccctctcccctcatgggcggatttggacttaaacaccctcctccacagattctcatcaagaacaccccggtacctgcaaatccttcgaccaccttcagtgcggcaaagtttgcttccttcatcacacagtattccacagggcaggtcagcgtggagatcgagtgggagctgcagaaggagaacagcaaacgctggaaccccgagatccagtacacttccaactacaacaaatctgttaatgtggactttactgtggacactaatggtgtgtattcagagcctcgccccattggcaccagatacctgactcgtaatctgtaattgcttgttaatcaataaaccgtttaattcgtttcagttgaactttggtctctgcgaagggcgaattcgtttaaaccctgcaggactagtccctttagtgagg

SEQ ID NO: 199 - DNA, 3162 bp, Artificial Sequence
  Description of Artificial Sequence: Synthetic polynucleotide
gaattgaatttagcggccgcgaattcgcccttcgcagagaccaaagttcaactgaaacgaattaaacggtttattgattaacaagcaattacagattacgagtcaggtatctggtgccaatggggcgaggctctgaatacacgccattagtgtccacagtaaagtccacattaacagacttgttgtagttggaagtgtactgaatttcgggattccagcgtttgctgttttccttctgcagctcccactcgatctccacgctgacctgtcccgtggagtactgtgtgatgaaggaagcaaactttgccgcactgaaggtggtcgaaggattcgcaggtaccggggtgttcttgatgagaatctgtggaggagggtgtttaagtccgaatccacccatgaggggagaggggtgaaaatgtccgtccgtgtgtggaatctttgcccagatgggcccctgaaggtacacatctctgtcctgccagaccatgcctggaagaacgccttgtgtgttgacatctgcggtagctgcttgtctgttgcctctctggaggttggtagatacagaaccgtactgctccgtagccacgggattggttgtcctgatttcctcttcgtctgtaatcatgaccttttcaatgtccacatttgttttctctgagccttgcttcccaaagatgagaaccccgctctgaggaaaaaacttttcttcattgtccttgtggcttgccatggccgggcccggattcaccagagagtctctgccattgaggtggtacttggtagctccagtccacgagtattcactgttgttgttatccgcagatgtctttgatactcgctgctggcggtaacagggtccaggaagccagttcctagactggtcccgaatgtcactcgctccggcctgagaaaactgaagccttgactgcgtggtggttccacttggagtgtttgttgtgctcaagtaatacaggtactggtcgatgagaggattcatgagacggtccagactctggctgtgagcgtagccgctgtggaaaggaacgtcctcaaaagtgtagctgaaggtaaagttgtttccggtacgcagcatctgagaaggaaagtactccaggcagtaaaatgaagagcgtcctactgcctgactcccgttgttcagggtgaggtatccatactgtggcaccatgaagacgtctgctgggaacggcgggaggcatccttgatgcgccgagccgaggacgtacgggagctggtactccgagtcagtaaacacctgaaccgtgctggtaaggttattggcaatcgtcgtcgtaccgtcattctgcgtgacctctttgacttgaatgttaaagagcttgaagttgagtctcttgggtcggaatccccagttgttgttgatgagtctttgccagtcacgtggtgaaaagtggcagtggaatctgttgaagtcaaaatacccccaaggggtgctgtagccaaagtagtgattgtcgttcgaggctcctgattggctggaaatttgtttgtagaggtggttgttgtaggtgggcagggcccaggttcgggtgctggtggtgatgactctgtcgcccatccatgtggaatcgcaatgccaatttcccgaggaattacccactccgtcggcgccctcgttattgtctgccattggtgcgccactgcctgtagccatcgtattagttcccagaccagagggggctgctggtggctgtccgagaggctgggggtcaggtactgagtctgcgtctccagtctgaccaaaattcaatctttttcttgcaggctgctggcccgcctttccggttcccgaggaggagtctggctccacaggagagtgctctaccggcctcttttttcctggagccgtcttgacaggttccccaaccaggcccagaggttcaagaaccctctttttcgcctggaagactgctcgtccgaggttgcccccaaaagacgtatcttctttaaggcgctcctgaaactccgcgtcggcgtggttgtacttgaggtacgggttgtctccgctgtcgagctgccggtcgtaggctttgtcgtgctcgagggccgcggcgtctgcctcgttgaccggctctcccttgtcgagtccgttgaagggtccgaggtacttgtacccaggaagcacaagacccctgctgtcgtccttatgccgctctgcgggctttggtggtggtgggccaggtttgagcttccaccactgtcttattccttcagagagagtgtcctcgagccaatctggaagataaccatcggcagccatacctgatttaaatcatttattgttcaaagatgcagtcatccaaatccacattgaccagatcgcaggcagtgcaagcgtctggcacctttcccatgatatgatgaatgtagcacagtttctgatacgcctttttgacgacagaaacgggttgagattctgacacgggaaagcactctaaacagtctttctgtccgtgagtgaagcagatatttgaattctgattcattctctcgcattgtctgcagggaaacagcatcagattcatgcccacgtgacgagaacatttgttttggtacctgtctgcgtagttgatcgaagcttccgcgtctgacgtcgatggctgcgcaactgactcgcgcacccgtttgggctcacttatatctgcgtcactgggggcgggtcttttcttggctccaccctttttgacgtagaattcatgctccacctcaaccacgtgatcctttgcccaccggaaaaagtctttgacttcctgcttggtgaccttcccaaagtcatgatccagacggcgggtgagttcaaatttgaacatccggtcttgcaacggctgctggtgttcgaaggtcgttgagttcccgtcaatcacggcgcacatgttggtgttggaggtgacgatcacgggagtcgggtctatctgggccgaggacttgcatttctggtccacgcgcaccttgcttcctccgagaatggctttggccgactccacgaccttggcggtcatcttcccctcctcccaccagatcaccatcttgtcgacacagtcgttgaagggaaagttctcattggtccagttgacgcagcaagggcgaattcgtttaaacctgcaggactagtccctttagtgaggg

SEQ ID NO: 200 - DNA, 3164 bp, Artificial Sequence
  Description of Artificial Sequence: Synthetic polynucleotide
gcgaattgaatttagcggccgcgaattcgcccttcgcagagaccaaagttcaactgaaacgaattaaacggtttattgattaacaagcaattacaaattacgagtcaggtatctggtgccaatggggcgaggctctgaatacacgccattagtgtccacagtaaagtccacattaacagacttgttgtagttggaagtgtactgaatttcgggattccagcgtttgctgttttccttctgcagctcccactcgatctccacgctgacctgtcccgtggagtactgtgtgatgaaggaagcaaactttgccgcactgaaggtggtcgaaggattcgcaggtaccggggtgttcttgatgagaatctgtggaggagggtgtttaggtccgaatccacccatgaggggagaggggtgaaaatgtccgtccgtgtgtggaatctttgcccagatgggcccctgaaggtacacatctctgtcctgccagaccatgcctggaagaacgccttgtgtgttgacatctgcggtagctgcttgtctgttgcctctctggaggttggtagatacagaaccatactgctccgtagccacgggattggttgtcctgatttcctcttcgtctgtaatcatgaccttttcaatgtccacatttgttttctctgagccttgcttcccaaagatgagaaccccgctctgaggaaaaaacttttcttcattgtccttgtggcttgccatggccgggcccggattcaccagagagtctctgccattgaggtggtacttggtagctccagtccacgagtattcactgttgttgttatccgcagatgtctttgatactcgctgctggcggtaacagggtccaggaagccagttcctagactggtcccgaatgtcactcgctccggcctgagaaaactgaagccttgactgcgtggtggttccacttggagtgtttgttgtgctcaagtaatacaggtactggtcgatgagaggattcatgagacggtccagactctggctgtgagcgtagctgctgtggaaaggaacgtcctcaaaagtgtagctgaaggtaaagttgtttccggtacgcagcatctgagaaggaaagtactccgggcagtaaaatgaagagcgtcctactgcctgactcccgttgctcagggtgaggtatccatactgtggcaccatgaagacgtctgctgggaacggcgggaggcatccttgatgcgccgagccgaggacgtacgggagctggtactccgagtcagtaaacacctgaaccgtgctggtaaggttattggcaatcgtcgtcgtaccgtcattctgcgtgacctctttgacttgaatgttaaagagcttgaagttgagtctcttgggtcggaatccccagttgttgttgatgagtctttgccagtcacgtggtgaaaagtggcagtggaatctgttgaagtcaaaatacccccaaggggtgctgtagccaaagtagtgattgtcgttcgaggctcctgattggctggaaatttgtctgtagaggtggttgttgtaggtgggcagggcccaggttcgggtgctggtggtgatgactctgtcgcccatccatgtggaatcgcaatgccgatttcccgaggaattacccactccgtcggcgccctcgttattgtctgccattggtgcgccactgcctgtagccatcgtattagttcccagaccagagggggctgctggtggctgtccgagaggctgggggtcaggtactgagtctgcgtctccagtctgaccaaaattcaatctttttcttgcaggctgctggcccgcctttccggttcccgaggaggagtctggctccacaggagagtgctctaccggcctcttttttcccggagccgtcttaacaggttccccaaccaggcccagaggttcaagaaccctctttttcgcctggaagactgctcgtccgaggttgcccccaaaagacgtatcttctttaaggcgctcctgaaactccgcgtcggcgtggttgtacttgaggtacgggttgtctccgctgtcgagctgccggtcgtaggctttgtcgtgctcgagggccgcggcgtctgcctcgttgaccggctctcccttgtcgagtccgttgaagggtccgaggtacttgtacccaggaagcacaagacccctgctgtcgtccttatgccgctctgcgggctttggtggtggtgggccaggtttgagcttccaccactgtcttattccttcagagagagtgtcctcgagccaatctggaagataaccatcggcagccatacctgatttaaatcatttattgttcaaagatgcagtcatccaaatccacattgaccagatcgcaggcagtgcaagcgtctggcacctttcccatgatatgatgaatgtagcacagtttctgatacgcctttttgacgacagaaacgggttgagattctgacacgggaaagcactctaaacagtctttctgtccgtgagtgaagcagatatttgaattctgattcattctctcgcattgtctgcagggaaacagcatcagattcatgcccacgtgacgagaacatttgttttggtacctgtctgcgtagttgatcgaagcttccgcgtctgacgtcgatggctgcgcaactgactcgcgcacccgtttgggcccacttatatctgcgtcactgggggcgggtcttttcttggctccaccctttttgacgtagaattcatgctccacctcaaccacgtgatcctttgcccaccggaaaaagtctttgacttcctgcttggtgaccttcccaaagtcatgatccagacggcgggtgagttcaaatttgaacatccggtcttgcaacggctgctggtgttcgaaggtcgttgagttcccgtcaatcacggcgcacatgttggtgttggaggtgacgatcacgggagtcgggtctatctgggccgaggacttgcatttctggtccacgcgcaccttgcttcctccgagaatggctttggccgactccacgaccttggcggtcatcttcccctcctcccaccagatcaccatcttgtcgacacagtcgttgaagggaaagttctcattggtccagttgacgcagcaagggcgaattcgtttaaacctgcaggactagtccctttagtgaggg

SEQ ID NO: 201 - DNA, 3163 bp, Artificial Sequence
  Description of Artificial Sequence: Synthetic polynucleotide
accctcactaaagggactagtcctgcaggtttaaacgaattcgcccttgctgcgtcaactggagcaatgagaactttcccttcaacgactgtgtcgacaagatggtgatttggtgggaggaggggaagatgaccgccaaggtcgtggagtcggccaaagccattctcggaggaagcaaggtgcgcgtggaccagaaatgcaagtcctcggcccagatagatccgactcccgtgatcgtcacctccaacaccaacatgtgcgccgtgattgacgggaactcaacgaccttcgaacaccagcagccgttgcaagaccggatgttcaaatttgaactcacccgccgtctggatcatgactttgggaaggtcaccaagcaggaagtcaaagactttttccggtgggcaaaggatcacgtggttgaggtggagcatggattctacgtcaaaaagggtggagccaagaaaagacccgcccctagtgacgcagatataagtgagcccaaacgggtgcgcgagtcagttgcgcagccatcgacgtcggacgcggaagcttcgatcaactacgcggacaggtaccaaaacaaatgttctcgtcacgtgggcatgaatctgatgctgtttccctgcagacaatgcgagagaatgaatcaaaattcaaatatctgcttcactcacggacagaaagactgtttagagtgctttcccgtgtcagaatctcaacctgtttctgtcgtcaaaaaggcgtatcagaaactgcgctacattcatcatatcatgggaaaggtgccagacgcttgcactgcctgcgatctggtcaatgtggatttggatgactgcatctctgaacaataaatgatttaaatcaggtatggctgccgatggttatcttccagattggctcgaggacactctctctgaaggaataagacagtggtggaagctcaaacctggcccaccaccaccaaagcccgcagagcggcataaggacgacagcaggggtcttgtgcttcctgggtacaagtacctcggacccttcaacggactcgacaagggagagccggtcaacgaggcagacgccgcggccctcgagcacgacaaggcctacgaccggcagctcgacagcggagacaacccgtacctcaagtacaaccacgccgacgcggagtttcaggagcgtcttaaagaagatacgtcttttgggggcaacctcggacgagcagtcttccaggcgaaaaagagggttcttgaacctctgggcctggttgaggaacctgttaagacggctccgggaaaaaagaggccggtagagcactctcctgcggagccagactcctcctcgggaaccggaaaagcgggccagcagcctgcaagaaaaagactgaatttcggtcagactggagacgcagactccgtacctgacccccagcctctcggacagccaccagcagcccccacaagtttgggatctactacaatggctacaggcagtggcgcaccaatggcagacaataacgagggtgccgatggagtgggtaattcctcaggaaattggcattgcgattcccaatggctgggcgacagagtcatcaccaccagcacccgaacctgggccctgcccacctacaacaaccacctttacaagcaaatctccagccaatcaggagcctcaaacgacaaccactactttggctacagcaccccctgggggtattttgacttcaacagattccactgccacttttcaccacgtgactggcaaagactcatcaacaacaactggggattccgacccaagagactcaacttcaagctctttaacattcaagtcaaagaggtcacgcagaatgacggtacgacgacgattgccaataaccttaccagcacggttcaggtgtttactgactcggagtaccagctcccgtacgtcctcggctcggcgcatcaaggatgcctcccgccgtttccagcggacgtcttcatggtcccacagtatggatacctcaccctgaacaacgggagtcaggcggtaggacgctcttccttttactgcctggagtgctttccttctcagatgctgcgtactggaaacaactttcagttcagctacacttttgaagacgtgcctttccacagcagctacgctcacagccagagtttggatcggctgatgaatcctctgatcgaccagtacctgtattatctaaacagaacacaaacagctagtggaactcagcagtctcggctactgtttagccaagctggacccacaagcatgtctcttcaagctaaaaactggctgcctggaccgtgttatcgccagcagcgtttgtcaaagcaggcaaacgacaacaacaacagcaactttccctggactggagctaccaagtaccacctcaatggcagagactctttggtgaacccgggcccggccatggccagccacaaggacgatgaagaaaagtttttccccatgcatggaaccctaatatttggtaaagaaggaacaaatgctaccaacgcggaattggaaaatgtcatgattacagatgaagaggaaatcaggaccaccaatcccgtggctacagagcagtacggatatgtgtcaaataatttgcaaaactcaaatactgctgcaagtactgaaactgtgaatcaccaaggagcattacctggtatggtgtggcaggatcgagacgtgtacctgcagggacccatttgggccaagattcctcacaccgatggacactttcatccttctccactgatgggaggttttggactcaaacacccgcctcctcagattatgatcaaaaacactcccgttccagccaatcctcccacaaacttcagttctgccaagtttgcttccttcatcacacagtattccacgggacaggtcagcgtggagatcgagtgggagctgcagaaggagaacagcaaacgctggaatcccgaaattcagtacacttccaactacaacaaatctgttaatgtggactttactgtggacactaatggtgtgtattcagagcctcgccccattggcaccagatacctgactcgtaatctgtaattgcttgttaatcaataaaccgtttaattcgtttcagttgaactttggtctctgcgaagggcgaattcgcggccgctaaattcaattcgcc

SEQ ID NO: 202 - protein, 735 aa, Artificial Sequence
  Description of Artificial Sequence: Synthetic polypeptide
MAADGYLPDWLEDTLSEGIRQWWKLKPGPPPPKPAERHKDDSRGLVLPGYKYLGPFNGLYKGEPVDEADAAALEHDKAYDRQLDSGDNPYLKYNHADAEFQERLKEDTSFGGNLGRAVFQAKKRVLEPLGLVGEPVKTAPGKKRPVEHSPVEPDSSSGTGKAGNQPARKRLNFGQTGDADSVPDPQPLGQPPAAPSGLGSTTMATGSGAPVADNNEGADGVGNSSGNWHCDSQWLGDRVITTSTRTWALPTYNNHLYKQISSQSGASNDNHYFGYSTPWGYFDFNRFHCHFSPRDRQRLINNNWGFRPKRLNFKLFNIQVKEVTQNDGTTTIANNLTSTVQVFTDSGYQLPYVLGLAHQGCLPPFPADVFMVPQYGYLTLNNGSQAVGRSSFYCLEYFPSQMLRTGNNFQFSYTFEDVPFHSSYAHSQSLDRLMNPLIDQYLYYLNKTQSNSGTLQQSRLLFSQAGPTSMSLQAKNWLPGPCYRQQRLSKQANDNNNSNFPWTAATKYHLNGRDSLVNPGPAMASHKDDEEKFFPMHGTLIFGKQGTNANDADLDNVMITDEEEIRTTNPVATEQYGYVSNNLQNSNTGPTTGTVNHQGALPGMVWQDRDVYLQGPIWAKIPHTDGHFHPSPLMGGFGLKHPPPQIMIKNTPVPANPPTNFSSAKFASFITQYSTGQVSVEIEWELQKEDSKRWNPEIQYTSNYNKPVNVDFTVDTNGVYSEPRPIGTRYLTRNL

SEQ ID NO: 203 - DNA, 2208 bp, Artificial Sequence
  Description of Artificial Sequence: Synthetic polynucleotide
atggctgccgatggttatcttccagattggctcgaggacactctctctgaaggaataagacagtggtggaagctcaaacctggcccaccaccaccaaagcccgcagagcggcataaggacgacagcaggggtcttgtgcttcctgggtacaagtacctcggacccttcaacggactctacaagggagagccggtcgacgaggcagacgccgcggccctcgagcacgacaaggcctacgaccggcagctcgacagcggagacaacccgtacctcaagtacaaccacgccgacgcggagtttcaggagcgccttaaagaagatacgtcttttgggggcaacctcggacgagcagtcttccaggccaaaaagagggttcttgaacctctgggcttggttggggagcctgttaaaacggctccgggaaaaaagaggccggtagagcactctcctgtggagccagactcctcctcgggaaccggaaaagcgggcaaccagcctgcaagaaaaagattgaattttggtcagactggagacgcagactccgtacctgacccccagcctctcggacagccaccagcagccccctctggtctgggatctactacaatggctacaggcagtggcgcaccagtggcagacaataacgagggtgccgatggagtgggtaattcctcaggaaattggcattgcgattcccaatggctgggcgacagagtcatcaccaccagcacccgaacctgggctctgcccacctacaataaccacctctacaagcaaatctccagccaatcaggagcctcaaacgacaaccactactttggctacagcaccccctgggggtattttgacttcaacagattccactgccacttttcaccacgtgaccggcaaagactcatcaacaacaactggggattccgaccaaaaagactcaacttcaagctctttaacattcaagtcaaagaggtcacgcagaatgacggtacgacgacgattgccaataaccttaccagcacggttcaggtgtttactgactcggggtaccagctcccgtacgtcctcggcttggcgcatcaaggatgcctcccgccgttcccagcagacgtcttcatggtgccacagtatggatacctcaccctgaacaacgggagtcaggcggtaggacgctcttccttttactgcctggagtactttccttctcagatgctgcgtactggaaacaactttcagttcagctacacctttgaagacgttcctttccacagcagctacgctcacagccagagtctggatcggctgatgaatcctctgatcgaccagtacctgtattatctgaacaagacacaatcaaatagtggaactcttcagcagtctcggctactgtttagccaagctggacccaccagcatgtctcttcaagctaaaaactggctgcctggaccttgctacagacagcagcgtctgtcaaagcaggcaaacgacaacaacaacagcaactttccctggactgcggctacaaagtatcatctaaatggccgggactcgttggttaatccaggaccagctatggccagccacaaagacgatgaagaaaagtttttccccatgcatggaaccctgatatttggtaaacaaggaacaaatgctaacgacgcggatttggacaatgtcatgattacagatgaagaagaaatccgcaccaccaatcccgtggctacggagcagtacggatatgtgtcaaataatttgcaaaactcaaatactggtccaactactggaactgtcaatcaccaaggagcgttacctggtatggtgtggcaggatcgagacgtgtacctgcagggacccatttgggccaagattcctcacaccgatggacactttcatccttctccacttatgggaggttttggactcaaacacccacctcctcagatcatgattaaaaacactcccgttccagccaatcctcccacaaacttcagttctgccaagtttgcttctttcatcacacagtattccacgggacaagtcagcgtggagatcgagtgggagctgcagaaggaggacagcaaacgctggaaccccgagatccagtacacttccaactataacaaacctgttaatgtggactttactgtggacactaatggtgtgtattcagagcctcgccccattggcaccagatacctgactcgtaatctgtaa

SEQ ID NO: 204 - DNA, 3161 bp, Artificial Sequence
  Description of Artificial Sequence: Synthetic polynucleotide
cgaattgatttagcggccgcgaattcgcccttcgcagagaccaaagttcaactgaaacgaattaaacggtttattgattaacaagcaattacagattacgagtcaggtatctggtgccaatggggcgaggctctgaatacacaccattagtgtccacagtaaagtccacattaacagatttgttgtagttggaagtgtactggatctcgggattccagcgtttgctgttctccttctgtagctcccactcgatctccacgctgacccgccccgtggaatactgtgtgatgaaggaagcaaactttgccgcactgaaggtggtcgaaggattcgcaggtaccggggtgtttttgatgagaatctgtggaggagggtgtttaagtccgaatccgcccatgaggggagaggggtgaaaatgtccgtccgtgtgcggaatctttgcccagataggcccctgcaggtacacgtctctgtcctgccagaccatgcctggaagaacgccttgtgtgttgacatctgcagtagatgcttgtgtgttgccgctctggaggttggtagatacagaaccatactgctccgtggccacgggattggtggttctgatttcctcttcgtctgtaatcatgaccttttcaatgtccacatttgttttctctgatccttgttttccaaagatgagaaccccgctctgaggaaaaaacttttcttcatcgtccttgtggctggccattgccgggcccggattcaccagagagtctctgccattgaggtggtacttggtagctccaatccacgagtattcactgttgttgttgtccgcagatgtctttgatactcgctgctggcggtaacagggtccaggaagccagttcctagactgatcccgaatgtcactcgctccggcctgagaaaactgaagcctggactgcgtggtggttccgcttggagtgtttgttctgctcaagtaatacaggtactggtcgatgagaggattcatgagacggtccaaactctggctgtgagcgtagctgctgtggaaaggaacatcctcaaaggtgtagctgaaggtaaagttgtttccggtacgcagcatctgagaagggaagtactccaggcagtaaaatgaagagcgtcctactgcctgactcccgttgttcagggtgaggtatccatactgtggcaccatgaagacgtctgctgggaacggcgggaggcatccttgatgcgccgagccgaggacgtacgggagctggtactccgagtcagtaaacacctgaaccgtgctggtaaggttattggcaatcgtcgtcgtaccatcattctgcgtgacctctctgacttgaatgttaaagagcttgaagttgagtctcttgggccggaatccccagttgttgttgatgagtctttgccagtcacgtggtgaaaagtggcagtggaatctgttgaagtcaaaatacccccaaggggtgctgtagccaaagtagtggttgtcgttgctggctcctgattggctggaaatctgcttgtacagatggttgttgtaggtgggcagagcccaggttcgggtgctggtggtgatgactctgtcgcccatccatgtggaatcgcaatgccaatttcccgaggaattacccactccgtcggcgccatcgttattgtctgccattggtgcgccactgcctgtagccatcgtattagttcccagaccagagggggctgctggtggctgtccgagaggctgggggtcaggtacggagtctgcgtctccagtctgaccgaaattcaatctctttcttgcaggctggttgcccgcttttccggttcccgaggaggagtctggctccacaggagagtgctctaccggcctcttttttcccggagccgtcttaacaggctcctcaaccaggcccagaggttcaagaaccctcttttttgcctggaagactgctcgtccgaggttgcccccaaaagacgtatcttctttaaggcgctcctgaaactccgcgtcggcgtggtcgtacttgaggtacgggttgtctccgctgtcgagctgccggtcgtaggccttgtcgtgctcgagggccgcggcgtctgcctcgttgaccggctctcccttgtcgagtccgttgaagggtccgaggtacttgtacccaggaagcacaagacccctgctgtcgtccttatgccgctctgcgggctttggtggtggtgggccaggtttgagcttccaccactgtcttattccttcagagagagtgtcctcgagccaatctggaagataaccatcggcagccatacctgatttaaatcatttattgttcagagatgcagtcatccaaatccacattgaccagatcgcaggcagtgcaagcgtctggcacctttcccatgatatgatgaatgtagcaaagtttctgatacgcctttttgacgacagaaacgggttgagattctgacacgggaaagcactctaaacagtctttctgtccgtgagtgaagcagatatttgaattctgattcattctctcgcattgtctgcagggaaacagcatcagattcatgcccacgtgacgagaacatttgttttggtacctgtccgcgtagttgatcgaagcttccgcgtctgacgtcgatggctgcgcaactgactcgcgcgcccgtttgggctcacttatatctgcgtcactgggggcgggtcttttcttggctccaccctttttgacgtagaattcatgctccacctcaaccacgtgatcctttgcccaccggaaaaagtctttcacttcctgcttggtgaccttcccaaagtcatgatccagacggcgggttagttcaaatttgaacatccggtcttgcaacggctgctggtgttcgaaggtcgttgagttcccgtcaatcacggcgcacatgttggtgttggaggtggcgatcacgggagtcgggtctatctgggccgaggacttgcacttttggtccacgcgcaccttgcttcctccgagaatggcttcggccgattccacgaccttggcggtcatctttccctcctcccaccagatcaccatcttgtcgacacagtcgttgaagggaaagttctcattggtccagttgacgcagcaagggcgaattcgtttaaacctgcaggaactagtcccttagtgagg

SEQ ID NO: 205 - protein, 735 aa, Artificial Sequence
  Description of Artificial Sequence: Synthetic polypeptide
MAADGYLPDWLEDTLSEGIRQWWKLKPGPPPPKPAERHKDDSRGLVLPGYKYLGPFNGLYKGEPVNEADAAALEHDKAYDRQLDSGDNPYLKYNHAGAEFQERLKEDTSFGGNLGRAVFQAKKRVLEPLGLVEEPVKTAPGKKRPVEHSPVEPDSSSGTGKAGNQPARKRLNFGQTGDADSVPDPQPLGQPPAAPSGLGSTTMATGSGAPVADNNEGADGVGNSSGNWHCDSQWLGDRVITTSTRTWALPTYNNHLYKQISSQSGASNDNHYFGYSTPWGYFDFNRFHCHFSPRDWQRLINNNWGFRPKRLNFKLFNIQVKEVTQNDGTTTIANNLTSTVQVFTDSEYQLPYVLGSAHQGCLPPFPADVFMVPQYGYLTLNNGSQAVGRSSFYCLEYFPSQMLRTGNNFQFSYTFEDVPFHSSYAHSQSLDRLMNPLIDQYLYYLNKTQSNSGTLQQSRLLFSQAGPTSMSLQAKNWLPGPCYRQQRLSKQANDNNNSNFPWTAATKYHLNGRDSLVNPGPAMASHKDDEEKFFPMHGTLIFGKQGTNANDADLDNVMITDEEEIRTTNPVATEQYGYVSNNLQDSNTGPTTGTVNHQGALPGMVWQDRDVYLQGPIWAKIPHTDGHFHPSPLMGGFGLKHPPPQIMIKNTPVPANPPTNFSSAKFASFITQYSTGQVSVEIEWELQKENSKRWNPEIQYTSNYNKSVNVDFTVDTNGVYSEPRPIGTRYLTRNL

SEQ ID NO: 206 - DNA, 2208 bp, Artificial Sequence
  Description of Artificial Sequence: Synthetic polynucleotide
atggctgccgatggttatcttccagattggctcgaggacactctctctgaaggaataagacagtggtggaagctcaaacctggcccaccaccgccaaagcccgcagagcggcataaggacgacagcaggggtcttgtgcttcctgggtacaagtacctcggacccttcaacggactctacaagggagagccggtcaacgaggcagacgccgcggccctcgagcacgacaaggcctacgaccggcagctcgacagcggagacaacccgtacctcaagtacaaccacgccggcgcggagtttcaggagcgccttaaagaagatacgtcttttgggggcaacctcggacgagcagtcttccaggccaaaaagagggttcttgaacctctgggcttggttgaggagcctgttaaaacggctccgggaaaaaagaggccggtagagcactctcctgtggagccagactcctcctcgggaaccggaaaagcgggcaaccagcctgcaagaaaaagattgaattttggtcagactggagacgcagactccgtacctgacccccagcctctcggacagccaccagcagccccctctggtctgggatctactacaatggctacaggcagtggcgcaccagtggcagacaataacgagggtgccgatggagtgggtaattcctcaggaaattggcattgcgattcccaatggctgggcgacagagtcatcaccaccagcacccgaacctgggctctgcccacctacaacaaccacctctacaagcaaatctccagccaatcaggagcctcaaacgacaaccactactttggctacagcaccccctgggggtattttgacttcaacagattccactgccacttttcaccacgtgactggcaaagactcatcaacaacaactggggattccgaccaaagagactcaacttcaagctctttaacattcaagtcaaagaggtcacgcagaatgacggtacgacgacgattgccaataaccttaccagcacggttcaggtgtttactgactcggagtaccagctcccgtacgtcctcggctcggcgcatcaaggatgcctcccgccgttcccagcagacgtcttcatggtgccacagtatggatacctcaccctgaacaacgggagtcaggcggtaggacgctcttccttttactgcctggagtactttccttctcagatgctgcgtactggaaacaactttcagttcagctacacctttgaagacgttcctttccacagcagctacgctcacagccagagtctggatcggctgatgaatcctctgatcgaccagtacctgtattatctgaacaagacacaatcaaatagtggaacccttcagcagtctcggctactgtttagccaagctggacccaccagcatgtctcttcaagctaaaaactggctgcctggaccttgctacagacagcagcgtctgtcaaagcaggcaaacgacaacaacaacagcaactttccctggactgcggctacaaagtatcatctaaatggccgggactcgttggttaatccaggaccagctatggccagccacaaagacgatgaagaaaagtttttccccatgcatggaaccctgatatttggtaaacaaggaacaaatgctaacgacgcggatttggacaatgtcatgattacagatgaagaagaaatccgcaccaccaatcccgtggctacggagcagtacggatatgtgtcaaataatttgcaagactcaaatactggtccaactactggaactgtcaatcaccaaggagcgttacctggtatggtgtggcaggatcgagacgtgtacctgcagggacccatttgggccaagattcctcacaccgatggacactttcatccttctccacttatgggaggttttggactcaaacacccacctcctcagatcatgattaaaaacactcccgttccagccaatcctcccacaaacttcagttctgccaagtttgcttctttcatcacacagtattccacgggacaagtcagcgtagagatcgagtgggagctgcagaaggagaacagcaaacgctggaaccccgagatccagtacacttccaactataacaaatctgttaatgtggactttactgtggacactaatggtgtgtattcagagcctcgccccattggcaccagatacctgactcgtaatctgtaa

SEQ ID NO: 207 - protein, 738 aa, Artificial Sequence
  Description of Artificial Sequence: Synthetic polypeptide
MAADGYLPDWLEDNLSEGIREWWDLKPGAPKPKANQQKQDDGRGLVLPGCKYLGPFNGLDKGEPVNAADAAALEHDKAYDQQLKAGDNPYLRYNHADAEFQERLQEDTSFGGNLGRAVFQAKKRVLEPLGLVEEGAKTAPGKKRPVEPSPQRSPDSSTGIGKTGQQPAKKRLNFGQTGDSESVPDPQPIGEPPAGPSGLGSGTMAAGGGAPMADNNEGADGVGSSSGNWHCDSTWLGDRVITTSTRTWALPTYNNHLYKQISNGTSGGSTNDNTYFGYSTPWGYFDFNRFHCHFSPRDWQRLINNNWGFRPKRLNFKLFNIQVKEVTQNEGTKTIANNLTSTIQVFTDSEYQLPYVLGSAHQGCPPPFPADVFMIPQYGYLTLNNGSQAVGRSSFYCLEYFPSQMRRTGNNFEFSYQFEDVPFHSSYAHSQSLDRLMNPLIDQYLYYLSRTQSTGGTAGTQQLLFSQAGPNNMSAQAKNWLPGPCYRQQRVSTTLSQNNNSNFAWTGATKYHLNGRDSLVNPGVAMATHKDDEERFFPSSGVLMFGKQGAGKDNVDYSSVMLTSEEEIKTTNPVATEQYGVVADNLQQQNAAPIVGAVNSQGALPGMVWQNRDVYLQGPIWAKIPHTDGNFHPSPLMGGFGLKHPPPQILIKNTPVPADPPTTFSQAKLASFITQYSTGQVSVEIEWELQKENSKRWNPEIQYTSNYNKSVNVDFTVDTNGVYSEPRPIGTRYLTRNL

SEQ ID NO: 208 - DNA, 2217 bp, Artificial Sequence
  Description of Artificial Sequence: Synthetic polynucleotide
atggctgccgatggttatcttccagattggctcgaggacaacctctctgagggcattcgcgagtggtgggacttgaaacctggagccccgaaacccaaagccaaccagcaaaagcaggacgacggccggggtctggtgcttcctggctgcaagtacctcggacccttcaacggactcgacaagggggagcccgtcaacgcggcggacgcagcggccctcgagcacgacaaggcctacgaccagcagctcaaagcgggtgacaatccgtacctgcggtataaccacgccgacgccgagtttcaggagcgtctgcaagaagatacgtcttttgggggcaacctcgggcgagcagtcttccaggccaagaagcgggttctcgaacctctcggtctggttgaggaaggcgctaagacggctcctggaaagaagagaccggtagagccatcaccccagcgttctccagactcctctacgggcatcggcaagacaggccagcagcccgcgaaaaagagactcaactttgggcagactggcgactcagagtcagtgcccgaccctcaaccaatcggagaaccccccgcaggcccctctggtctgggatctggtacaatggctgcaggcggtggcgctccaatggcagacaataacgaaggcgccgacggagtgggtagttcctcaggaaattggcattgcgattccacatggctgggcgacagagtcatcaccaccagcacccgaacctgggccctccccacctacaacaaccacctctacaagcaaatctccaacgggacatcgggaggaagcaccaacgacaacacctacttcggctacagcaccccctgggggtattttgactttaacagattccactgccacttctcaccacgtgactggcagcgactcatcaacaacaactggggattccggcccaagagactcaacttcaagctcttcaacatccaggtcaaggaggtcacgcagaatgaaggcaccaagaccatcgccaataaccttaccagcacgattcaggtctttacggactcggaataccagctcccgtacgtcctcggctctgcgcaccagggctgcccgcctccgttcccggcggacgtcttcatgattcctcagtacgggtacctgactctgaacaacggcagtcaggccgtgggccgttcctccttctactgcctggagtactttccttctcaaatgcggagaacgggcaacaactttgagttcagctaccagtttgaggacgtgccttttcacagcagctacgcgcatagccaaagcctggaccggctgatgaaccccctcatcgaccagtacctgtactacctgtctcggactcagtccacgggaggtaccgcaggaactcagcagttgctattttctcaggccgggcctaataacatgtcggctcaggccaaaaactggctacccgggccctgctaccggcagcaacgcgtctccacgacactgtcgcaaaataacaacagcaactttgcttggaccggtgccaccaagtatcatctgaatggcagagactctctggtaaatcccggtgtcgctatggcaacgcacaaggacgacgaagagcgattttttccatccagcggagtcttgatgtttgggaaacagggagctggaaaagacaacgtggactatagcagcgttatgctaaccagtgaggaagaaatcaaaaccaccaacccagtggccacagaacagtacggcgtggtggccgataacctgcaacagcaaaacgccgctcctattgtaggggccgtcaacagtcaaggagccttacctggcatggtctggcagaaccgggacgtgtacctgcagggtcctatctgggccaagattcctcacacggacggcaactttcatccttcgccgctgatgggaggctttggactgaaacacccgcctcctcagatcctgattaagaatacacctgttcccgcggatcctccaactaccttcagtcaagccaagctggcgtcgttcatcacgcagtacagcaccggacaggtcagcgtggaaattgaatgggagctgcagaaagagaacagcaagcgctggaacccagagattcagtatacttccaactataacaaatctgttaatgtggactttactgtggacactaatggtgtgtattcagagcctcgccccattggcaccagatacctgactcgtaatctgtaa

SEQ ID NO: 209 - DNA, 3167 bp, Artificial Sequence
  Description of Artificial Sequence: Synthetic polynucleotide
attgaatttagcggccgcgaattcgcccttcgcagagaccaaagttcaactgaaacgaattaaacggtttattgattaacaagcaattacagattacgagtcaggtacctggtgccaatggggcgaggctctgaatacacaccattagtgtccacagtaaagtccacattaacagatttgttgtagttggaagtgtactgaatctcgggattccagcgtttgctgttctccttctgcagctcccactcgatctccacgctgacctgccccgtggagtactgtgtaatgaaggaagcaaactttgccgcactgaaggtagtcgaaggattcgcaggtaccggggtgttcttgatgagaatctgcgggggagggtgtttaagtccgaatccgcccatgaggggagaggggtgaaaatgtccgtccgtgtgtggaatctttgcccagatgggcccctgcaggtacacgtctctgtcctgccacaccatgcctggaagaacgccttgtgtgttgacatctgaggtagctgcttgtgtgttgccgctctggaggttggtagatacagaaccatactgctccgtagccacgggattggtggtcctgatttcctcttcgtctgtaatcatgaccttttcaatgtccacattagtttttcccgagtcttgttttccaaagatgagaaccccgctctgaggaaaaaacttttcttcatcgtccttgtggctggccatggccgggcccggattcaccagagagtctcttccattaaggtggtacttggtagctccagtccacgagtattcactgttgttgttatccgcagatgtctttgatactcgctgctggcggtaacagggtccaggaagccagttcctagactggtcccgaatgtcacttgctccggcctgagaaaactgaagccttgactgcgtggtggttccgcttggagtgtttgttctgctcaagtaatacaggtactggtcgatgagaggattcatgagacggtccaaactctggctgtgggcgtagctgctgtggaaaggaacgtcctcaaaggtgtagctgaaggtaaagttgtttccggtacgcagcatctgagaaggaaagtactccaggcagtaaaatgaagagcgtcctactgcctgactcccgttgttcagggtgaggtatccatactgtggcaccatgaagacgtctgctgggaacggcgggaggcatccttgatgcgccgagccgaggacgtacgggagctggtactccgagtcagtaaacacctgaaccgtgctggtaaggttattggcaatcgtcgtcgtaccgtcattctgcgtgacctccttgacttgaatgttaaagagcttgaagttgagtcttttgggccggaatccccaattgttgttgatgagtctttgccagtcacgtggcgaaaagtggcagtggaatctgttgaagtcaaaatacccccaaggggtgctgtagccaaagtagtggttgtcgtttgaggctcctgattggctggaaatctgcttgtagaggtggttgttgtaggtgggcagagcccaggtgcgggtgctggtggtgatgactctgtcgcccatccatgtggaatcgcaatgccaatttcccgaggaattacccactccgtcggcgccctcgttattgtctgccattggtgcgccactgcctgtagccatcgtattagttcccagaccagagggggctgctggtggctgtccgagaggctgggggtcaggtacggagtctgcgtctccagtctgaccgaaattcaatctctttcttgcaggctgctggcccgcttttccggttcccgaggaggagtctggctccgcaggagagtgctctaccggcctcttttttcccggagccgtcttaacaggttcctcaaccaggcccagaggttcaagaaccctctttttcgcctggaagactgctcgtccgaggttgcccccaaaagacgtatcttctttaagacgctcctggaactccgcgtcggcgtggttgtacttggggtacgggttgtctccgctgtcgagctgccggtcgtaggccttgtcgtgctcgagggccgcggcgtctgcctcgttgaccggctctcccttgtcgagtccgttgaagggtccaaggtacttgtacccaggaagcacaagacccctgctgtcgtccttatgccgctctgcgggctttggtggtggtgggccaggtttgagcttccaccactgtcttattccttcagagagagtgtcctcgagccaatctggaagataaccatcggcagccatacctgatttaaatcatttattgttcagagatgcagtcatccaaatccacattgaccagatcgcaagcagtgcaagcgtctggcacctttcccatgatatgatgaatgtagcacagtttctgatacgcctttttgacgacagaaacgggttgagattctgacacgggaaagcactctaaacagtctttctgtccgtgagtgaagcagatatttgaattctgattcattctctcgcattgtctgcagggaaacagcatcagattcatgcccacgtgacgagaacatttgttttggtacctgtccgcgtagttgattgaagcttccgcgtctgacgtcgatggctgcgcaactgactcgcgcgcccgtttgggctcacttatatctgcgtcactgggggcgggtctttttttggctccaccctttttgacgtagaattcatgctctacctcaaccacgtgatcctttgcccaccggaaaaagtctttgacttcctgcttggtgaccttcccaaagtcatgatccagacggcgggtgagttcaaatttgaacatccggtcttgcaacggctgctggtgttcgaaggtcgttgagttcccgtcaatcactgcgcacatgttggtgttggaggtgacaatcacgggagtcgggtctatctgggccgaggacttgcatttctggtccacgcgcaccttgcttcctccgagaatggctttggccgactccacgaccttggcggtcatcttcccctcctcccaccagatcaccatcttgtcgacgcaatcattgaaaggaaagttctcattggtccagttgacgcagccgtagaaagggcgaattcgtttaaacctgcaggactagtccctttagtgagggt

SEQ ID NO: 210 - DNA, 3161 bp, Artificial Sequence
  Description of Artificial Sequence: Synthetic polynucleotide
aattgaatttagcggccgcgaattcgcccttcgcagagaccaaagttcaactgaaacgaattaaacggtttattgattaacaagcaattacagattacgagtcaggtatctggtgccaatggggcgaggctctgaatacacaccattagtgtccacagtaaagtccacattaacagatttgttgtagttggaagtgtactgaatctcgggattccagcgtttgctgttctccttctgcagctcccactcgatctccacgctgacctgccccgtggagtactgtgtaatgaaggaagcaaactttgccgcactgaaggtagtcgaaggattcgcaggtaccggggtgttcttgatgagaatctgcgggggagggtgtttaagtccgaatccgcccatgaggggagaggggtgaaaatgtccgtccgtgtgtggaatctttgcccagatgggcccctgcaggtacacgtctctgtcctgccacaccatgcctggaagaacgccttgtgtgttgacatctgaggtagctgcttgtgtgttgccgctctggaggttggtagatacagaaccatactgctccgtagccacgggattggtggtcctgatttcctcttcgtctgtaatcatgaccttttcaatgtccacattagtttttcccgagtcttgttttccaaagatgagaaccccgctctgaggaaaaaacttttcttcatcgtccttgtggctggccatggccgggcccggattcaccagagagtctcttccattaaggtggtacttggtagctccagtccacgagtattcactgttgttgttatccgcagatgtctttgatactcgctgctggcggtaacagggtccaggaagccagttcctagactggtcccgaatgtcacttgctccggcctgagaaaactgaagccttgactgcgtggtggttccgcttggagtgtttgttctgctcaagtaatacaggtactggtcgacgagaggattcatgagacggtccaaactctggctgtgggcgtagctgctgtggaaaggaacgtcctcaaaggtgtagctgaaggtaaagttgtttccggtacgcagcatctgagaaggaaagtactccaggcagtaaaatgaagagcgtcctactgcctgactcccgttgttcagggtgaggtatccatactgtggcaccatgaagacgtctgctgggaacggcgggaggcatccttgatgcgccgagccgaggacgtacgggagctggtactccgagtcagtaaacacctgaaccgtgctggtaaggttattggcaatcgtcgtcgtaccgtcattctgcgtgacctccttgacttgaatgttaaagagcttgaagttgagtcttttgggccgggatccccaattgttgttgatgagtctttgccagtcacgtggcgaaaagtggcagtggaatctgttgaagtcaaaatacccccaaggggtgctgtagccaaagtagtggttgtcgtttgaggctcctgattggctggaaatctgcctgtagaggtggttgttgtaggtgggcagagcccaggtgcgggtgctggtggtgatgactctgtcgcccatccatgtggaatcgcaatgccaatttcccgaggaattacccactccgtcggcgccctcgttattgtctgccattggtgcgccactgcctgtagccatcgtattagttcccagaccagagggggctgctggtggctgtccgagaggctgggggtcaggtacggagtctgcgtctccagtctgaccgaaattcaatctccttcttgcaggctgctggcccgcttttccggttcccgaggaggagtctggctccgcaagagagtgctctaccggcctcttttttcccggagccgtcttaacaggttcctcaaccaggcccagaggttcaagaaccctctttttcgcctggaagactgctcgtccgaggttgcccccaaaagacgtatcttctttaagacgctcctggaactccgcgtcggcgtggttgtacttgaggtacgggttgtctccgccgtcgagctgccggtcgtaggccttgtcgtgctcgagggccgcggcgtctgcctcgttgaccggctctcccttgtcgagtccgttgaagggtccaaggtacttgtacccaggaagcacaagacccctgctgtcgtccttatgccgctctgcgggctttggtggtggtgggccaggtttgagcttccaccactgtcttattccttcagagagagtgtcctcgagccaatctggaagataaccatcggcagccatacctgatttaaatcatttattgttcagagatgcagtcatccaaatccacattgaccagatcgcaagcagtgcaagcgtctggcacctttcccatgatatgatgaatgtagcacagtttctgatacgcctttttgacgacagaaacgggttgagattctgacacgggaaagcactctaaacagtctttctgtccgtgagtgaagcagatatttgaattctgattcattctctcgcattgtctgcagggaaacagcatcagattcatgcccacgtgacgagaacatttgttttggtacctgtccgcgtagttgattgaagcttccgcgtctgacgtcgatggctgcgcaactgactcgcgcgcccgtttgggctcacttatatctgcgtcactgggggcgggtctttttttggctccaccctttttgacgtagaattcatgctctacctcaaccacgtgatcctttgcccaccggaaaaagtctttgacttcctgcttggtgaccttcccaaagtcatgatccagacggcgggtgagttcaaatttgaacatccggtcttgcaacggctgctggtgttcgaaggtcgttgagttcccgtcaatcactgcgcacatgttggtgttggaggtgacaatcacgggagtcgggtctatctgggccgaggacttgcatttctggtccacgcgcaccttgcttcctccgagaatggctttggccgactccacgaccttggcggtcatcttcccctcctcccaccagatcaccatcttgtcgacgcaatcattgaaaggaaagttctcattggtccagttgacgcagcaagggcgaattcgtttaaacctgcaggactagtccctttagtgaggg

SEQ ID NO: 211 - DNA, 3172 bp, Artificial Sequence
  Description of Artificial Sequence: Synthetic polynucleotide
gattgaatttagcggccgcgaattcgcccttgctgcgtcaactggaccaatgagaactttcccttcaacgattgcgtcgacaagatggtgatctggtgggaggagggcaagatgaccgccaaggtcgtggagtccgccaaggccattctgggtggaagcaaggtgcgcgtggaccaaaagtgcaagtcatcggcccagatcgaccccacgcccgtgatcgtcacctccaacaccaacatgtgcgccgtgatcgacgggaacagcaccaccttcgagcaccagcagcccctgcaggaccgcatgttcaagttcgagctcacccgccgtctggagcacgactttggcaaggtgaccaagcaggaagtcaaagagttcttccgctgggctcaggatcacgtgactgaggtggcgcatgagttctacgtcagaaagggcggagccaccaaaagacccgcccccagtgacgcggatataagcgagcccaagcgggcctgcccctcagttgcggagccatcgacgtcagacgcggaagcaccggtggactttgcggacaggtaccaaaacaaatgttctcgtcacgcgggcatgcttcagatgctgtttccctgcaagacatgcgagagaatgaatcagaatttcaacgtctgcttcacgcacggggtcagagactgctcagagtgcttccccggcgcgtcggaatctcaacccgtcgtcagaaaaaagacgtatcagaaactgtgcgcgattcatcatctgctggggcgggcacccgagattgcgtgttcggcctgcgatctcgtcaacgtggacttggatgactgtgtttctgagcaataaatgacttaaaccaggtatggctgctgacggttatcttccagattggctcgaggacaacctctctgagggcattcgcgagtggtgggacctgaaacctggagcccccaagcccaaggccaaccagcagaagcaggacgacggccggggtctggtgcttcctggctacaagtacctcggacccttcaacggactcgacaagggggagcccgtcaacgcggcggacgcagcggccctcgagcacgacaaggcctacgaccagcagctcaaagcgggtgacaatccgtacctgcggtataaccacgccgacgccgagtttcaggagcgtctgcaagaagatacgtcttttgggggcaacctcgggcgagcagtcttccaggccaagaagcgggttctcgaacctctcggtctggttgaggaagctgctaagacggctcctggaaagaagagaccggtagaaccgtcacctcagcgttcccccgactcctccgcgggcatcggcaagaaaggccagcagcccgctaaaaagagactgaactttggtcagactggcgactcagagtcagtccccgaccctcaaccaatcggagaaccaccagcaggcccctctggtctgggatctggtacaatggctgcaggcggtggcgctccaatggcagacaataacgaaggcgccgacggagtgggtagttcctcaggaaattggcattgcgattccacatggctgggcgacagagtcatcaccaccagcacccgaacctgggccctgcccacctacaacaaccacctctacaagcaaatatccaatgggacatcgggaggaagcaccaacgacaacacctacttcggctacagcaccccctgggggtattttgacttcaacagattccactgccacttctcaccacgtgactggcagcgactcatcaacaacaactggggattccggccaaaaagactcagcttcaagctcttcaacatccaggtcaaggaggtcacgcagaatgaaggcaccgagaccatcgccaataaccttaccagcacgattcaggtatttacggactcggaataccagctgccgtacgtcctcggctccgcgcaccagggctgcctgcctccgttcccggcggacgtcttcatgattccccagtacggctaccttacactgaacaatggaagtcaagccgtaggccgttcctccttctactgcctggaatattttccatctcaaatgctgcgaactggaaacaattttgaattcagctacaccttcgaggacgtgcctttccacagcagctgcgcacacagccagagctcggaccgactgatgaatcctctcatcgaccagtacctgtactacttatccagaactcggtccacaggaggaactcaaggtacccagcaattgttattttctcaagctgggcctgcaaacatgtcggctcaggctaagaactggctacctggaccttgctaccggcagcagcgagtctctacgacactgtcgcaaaacaacaacagcaactttgcttggactggtgccaccaaatatcacctgaacggaagagactctttggtaaatcccggtgtcgccatggcaacccacaaggacgacgaggaacgcttcttcccgtcgagtggagtcctgatgtttggaaaacagggtgctggaagagacaatgtggactacagcagcgttatgctaaccagcgaagaagaaattaaaaccactaaccctgtagccacagaacaatacggtgtggtggctgacaacttgcagcaaaccaatacagggcctattgtgggaaatgtcaacagccaaggagccttacctggcatggtctggcagaaccgagacgtgtacctgcagggtcccatctgggccaagattcctcacacggacggcaacttccacccttcaccgctaatgggaggatttggactgaagcacccacctcctcagatcctgatcaagaacacgccggtacctgcggatcctccaacaacgttcagccaggcgaaattggcttccttcattacgcagtacagcaccggacaggtcagcgtggaaatcgagtgggagctgcagaaggagaacagcaaacgctggaacccagagattcagtacacttcaaactactacaaatctacaaatgtggactttgctgtcaatacagagggaacttattctgagcctcgccccattggtactcgttacctcacccgtaatctgtaattgctggttaatcaataaaccgtttgattcgtttcagttgaactttggtctctgcgaagggcgaattcgtttaaacctgcaggactagtccctttagtgagg

SEQ ID NO: 212 - DNA, 3172 bp, Artificial Sequence
  Description of Artificial Sequence: Synthetic polynucleotide
gattgaatttagcggccgcgaattcgcccttgctgcgtcaactggaccaatgagaactttcccttcaacgattgcgtcgacaagatggtgatctggtgggaggagggcaagatgaccgccaaggtcgtggagtccgccaaggccattctgggtggaagcaaggtgcgcgtggaccaaaagtgcaagtcatcggcccagatcgaccccacgcccgtgatcgtcacctccaacaccaacatgtgcgccgtgatcggcgggaacagcaccaccttcgagcaccagcagcccctgcaggaccgcatgttcaagttcgagctcacccgccgtctggagcacgactttggcaaggtgaccaagcaggaagtcaaagagttcttccgctgggctcaggatcacgtgactgaggtggcgcatgagttctacgtcagaaagggcggagccaccaaaagacccgcccccagtgacgcggatataagcgagcccaagcgggcctgcccctcagttgcggagccatcgacgtcagacgcggaagcaccggtggactttgcggacaggtaccaaaacaaatgttctcgtcacgcgggcatgcttcagatgctgtttccctgcaagacatgcgagagaatgaatcagaatttcaacgtctgcttcacgcacggggtcagagactgctcagagtgcctccccggcgcgtcagaatctcaacccgtcgtcagaaaaaagacgtatcagaaactgtgcgcgattcatcatctgctggggcgggcacccgagattgcgtgttcggcctgcgatctcgtcaacgtggacttggatgactgtgtttctgagcaataaatgacttaaaccaggtatggctgctgacggttatcttccagattggctcgaggacaacctctctgagggcattcgcgagtggtgggacctgaaacctggagcccccaagcccaaggccaaccagcagaagcaggacgacggccggggtctggtgcttcttggctacaagtacctcggacccttcaacggactcgacaagggggagcccgtcaatgcggcggacgcagcggccctcgagcacgacaaggcctacgaccagcagctcaaagcgggtgacaatccgtacctgcggtataaccacgccgacgccgagtttcaggagcgtctgcaagaagatacgtcttttgggggcaacctcgggcgagcagtcttccaggccaagaagcgggttctcgaacctctcggtctggttgaggaagctgctaagacggctcctggaaagaagagaccggtagaaccgtcacctcagcgttcccccgactcctccacgggcatcggcaagaaaggccagcagcccgctaaaaagagactgaactttggtcagactggcgactcagagtcagtccccgaccctcaaccaatcggagaaccaccagcaggcccctctggtctgggatctggtacaatggctgcaggcggtggcgctccaatggcagacaataacgaaggcgccgacggagtgggtagttcctcaggaaattggcattgcgattccacatggctgggcgacagagtcatcaccaccagcacccgaacctgggccctgcccacctacaacaaccacctctacaagcaaatatccaatgggacatcgggaggaagcaccaacgacaacacctacttcggctacagcaccccctgggggtattttgacttcaacagattccactgccacttctcaccacgtgactggcagcgactcatcaacaacaactggggattccggccaaaaagactcagcttcaagctcttcaacatccaggtcaaggaggtcacgcagaatgaaggcaccaagaccatcgccaataaccttaccagcacgattcaggtatttacggactcggaataccagctgccgtacgtcctcggctccgcgcaccagggctgcctgcctccgttcccggcggacgtcttcatgattccccagtacggctaccttacactgaacaatggaagtcaagccgtaggccgttcctccttctactgcctggaatattttccatctcaaatgctgcgaactggaaacaattttgaattcagctacaccttcgaggacgtgcctttccacagcggctacgcacacagccagagcttggaccgactgatgaatcctctcatcgaccagtacctgtactacttatccagaactcagtccacaggaggaactcaaggtacccagcaattgttattttctcaagctgggcctgcaaacatgtcggctcaggctaagaactggctacctggaccttgctaccggcagcagcgagtctctacgacactgtcgcaaaacaacaacagcaactttgcttggactggtgccaccaaatatcacctgaacggaagagactctttggtaaatcccggtgtcgccatggcaacccacaaggacgacgaggaacgcttcttcccgtcgagtggagtcctgatgtttggaaaacagggtgctggaagagacaatgtggactacagcagcgttatgctaaccagcgaagaagaaattaaaaccactaaccctgtagccacagaacaatacggtgtggtggctgacaacttgcagcaaaccaatacagggcctattgtgggaaatgtcaacagccaaggagccttacctggcatggtctggcagaaccgagacgtgtacctgcagggtcccatctgggccaagattcctcacacggacggcaacttccacccttcaccgctaatgggaggatttggactgaagcacccacctcctcagatcctgatcaagaacacgccggtacctgcggatcctccaacgacgttcagccaggcgaaattggcttccttcattacgcagtacagcaccggacaggtcagcgtggaaatcgagtgggagctgcagaaggagaacagcaaacgctggaacccagagattcagtacacttcaaactactacaaatctacaaatgtggactttgctgtcaatacagagggaacttattctgagcctcgccccattggtactcgttacctcacccgtaatctgtaattgctggttaatcaataaaccgtttgattcgtttcagttgaactttggtctctgcgaagggcgaattcgtttaaacctgcaggactagtccctttagtgagg

SEQ ID NO: 213 - DNA, 2208 bp, Artificial Sequence
  Description of Artificial Sequence: Synthetic polynucleotide
atggctgccgatggttatcttccagattggctcgaggacactctctctgaaggaataagacagtggtggaagctcaaacctggcccaccaccaccaaagcccgcagagcggcataaggacgacagcaggggtcttgtgcttcctgggtacaagtacctcggacccttcaacggactcgacaagggagagccggtcaacgaggcagacgccgcggccctcgagcacgacaaggcctacgaccggcagctcgaaagcggagacaacccgtacctcaagtacaaccacgccgacgcggagtttcaggagcgtcttaaagaagatacgtcttttgggggcaacctcggacgagcagtcttccaggcgaaaaagagggttcttgaacctctgggcctggttgaggagcctgttaaaacggctccgggaaaaaagaggccggtagagcactctcctgtggagccagactcctcctcgggaaccggaaaagcgggccagcagcctgcgagaaaaagattgaattttggtcagactggagacgcagactccgtacctgacccccagcctctcggacagccaccagcagccccctctggtctgggatctactacaatggcttcaggcagtggcgcaccagtggcagacaataacgagggtgccgatggagtgggtaattcctcaggaaattggcattgcgattcccaatggctgggcgacagagtcatcaccaccagcacccgaacctgggccctgcccacctacaacaaccacctctacaagcaaatctccagccaatcaggagcctcaaacgacaaccactactttggctacagcaccccctgggggtattttgacttcaacagattccactgccacttttcaccacgtgactggcaaagactcatcaacaacagctggggattccgacccaaaagactcaacttcaagctctttaacattcaagtcaaagaggtcacgcagaatgacggtacgacgacgattgccaataaccttaccagcacggttcaagtgtttaccgactcggagtaccagctcccgtacgtcctcggctcggcgcatcaaggatgcctcccgccgttcccagcagacgtctttatggtcccacagtatggatacctcaccctgaacaacgggagtcaggcggtaggacgctcttccttttactgcctggagtactttccttctcagatgctgcgtactggaaacaactttcagttcagctacacctttgaagacgttcccttccacagcagctacgctcacagccagagtctggatcggctgctgaatcctctgatcgaccagtacctatattatctgaacaagacacaatcaaatagtggaactcttcagcagtctcggctactgtttagccaagctggacccaccagcatgtctcttcaagctaaaaactggctgcctggaccttgctacagacagcagcgtctgtcaaagcaggcaaacgacaacaacaacagcaactttccctggactgcggctacaaagtatcatctaaatggccgggactcgttggttaatccaggaccagctatggccagccacaaagacgatgaagaaaagtttttccccatgcatggaaccctgatatttggtaaacaaggaacaaatgctaacgacgcggatttggacaatgtcatgattacagatgaagaagaaatccgcaccaccaatcccgtggctacggagcagtacggatatgtgtcaaataatttgcaaaactcaaatactggtccaactactggaactgtcaatcaccaaggagcgttacctggtatggtgtggcaggatcgagacgtgtacctgcagggacccatttgggccaagattcctcacacggacgggcactttcatccttctccactaatgggaggttttgggctcaaacacccgcctcctcagatcatgatcaaaaacactcccgttccagccaatcctcctacaaacttcagttcttccaagtttgcttctttcatcacacagtattccacggggcaggtcagcgtggagatcgagtgggagctgcagaaggagaacagcaaacgctggaatcccgaaattcagtatacttccaactacaacaaatctgttaatgtggactttactgtggacactaatggtgtgtattcagagcctcgccccattggcaccagatacccgactcgtaatctgtaa

SEQ ID NO: 214 - protein, 735 aa, Artificial Sequence
  Description of Artificial Sequence: Synthetic polypeptide
MAADGYLPDWLEDTLSEGIRQWWKLKPGPPPPKPAERHKDDSRGLVLPGYKYLGPFNGLDKGEPVNEADAAALEHDKAYDRQLESGDNPYLKYNHADAEFQERLKEDTSFGGNLGRAVFQAKKRVLEPLGLVEEPVKTAPGKKRPVEHSPVEPDSSSGTGKAGQQPARKRLNFGQTGDADSVPDPQPLGQPPAAPSGLGSTTMASGSGAPVADNNEGADGVGNSSGNWHCDSQWLGDRVITTSTRTWALPTYNNHLYKQISSQSGASNDNHYFGYSTPWGYFDFNRFHCHFSPRDWQRLINNSWGFRPKRLNFKLFNIQVKEVTQNDGTTTIANNLTSTVQVFTDSEYQLPYVLGSAHQGCLPPFPADVFMVPQYGYLTLNNGSQAVGRSSFYCLEYFPSQMLRTGNNFQFSYTFEDVPFHSSYAHSQSLDRLLNPLIDQYLYYLNKTQSNSGTLQQSRLLFSQAGPTSMSLQAKNWLPGPCYRQQRLSKQANDNNNSNFPWTAATKYHLNGRDSLVNPGPAMASHKDDEEKFFPMHGTLIFGKQGTNANDADLDNVMITDEEEIRTTNPVATEQYGYVSNNLQNSNTGPTTGTVNHQGALPGMVWQDRDVYLQGPIWAKIPHTDGHFHPSPLMGGFGLKHPPPQIMIKNTPVPANPPTNFSSSKFASFITQYSTGQVSVEIEWELQKENSKRWNPEIQYTSNYNKSVNVDFTVDTNGVYSEPRPIGTRYPTRNL

SEQ ID NO: 215 - DNA, 2208 bp, Artificial Sequence
  Description of Artificial Sequence: Synthetic polynucleotide
atggctgccgatggttatcttccagattggctcgaggacactctctctgaaggaataagacagtggtggaagctcaaacctggcccaccaccaccaaagcccgcagagcggcataaggacgacagcaggggtcttgtgcttcctgggtacaagtacctcggacccttcaacggactcgacaagggagagccggtcaacgaggcagacgccgcggccctcgagcacgacaaggcctacgaccggcagctcgacagcggagacaacccgtacctcaagtacaaccacgccgacgcggagtttcaggagcgtcttaaagaagatacgtcttttgggggcaacctcggacgagcagtcttccaggccaaaaagaggattcttgaacctctgggcctggttgaggaacctgttaagacggctccgggagaaaagaggccggtagagcactctcctgcggagccagactcctcctcgggaaccggaaaagcgggccagcagcctgcaagaaagagattgaattttggccagactggagacgcagactcagtacctgacccccagcctctcggacagccaccagcagccccctctggtctgggaactaatacgatggcttcaggcagtggcgcaccaatggcagacaataacgagggcgccgacggagtgggtaattcctcgggaaattggtattgcgattccacatggatgggcgacagagtcatcaccaccagcacccgcacctgggccctgcccacctacaacaaccatctgtacaagcaaatctccagccagtctggagccagcaacgacaaccactactttggctacagcaccccctgggggtattttgacttcaacagattccactgccacttctccccacgtgactggcaaagactcatcaacaacaactggggattccggcccaagagactcagcttcaagctctttaacattcaagtcaaagaggtcacgcagaatgacggtacgacgacgattgccaataaccttaccagcacggttcaggtgtttactgactcggagtaccagctcccgtacgtcctcggctcggcgcatcaaggatgcctcccgccgttcccagcagacgtcttcatggtgccacagtatggatacctcaccctgaacaacggcagtcaggcggtaggacgctcttccttttactgcctggagtactttccttctcagatgcttcgtaccggaaacaactttaccttcagctacacctttgaagacgttcctttccatagcagctacgctcacagccaaagtctggaccgtctcatgaatcctctcatcgaccagtacctgtattacttgagcagaacaaacactccaagcggaaccaccacgatgtccaggcttcagttttctcaggccggagcaagtgacattcgggaccagtctagaaactggcttcctggaccctgttaccgccagcagcgagtatcaaagacagctgcggacaacaacaacagtgattactcgtggactggagctaccaagtaccacctcaatggaagagactctctggtgaatccgggcccagctatggccagccacaaggacgatgaagaaaaatattttcctcagagcggggttctcatctttggaaaacaagactcgggaaaaactaatgtggacattgaaaaggttatgattacagacgaagaggaaatcaggaccaccaatcccgtggctacggagcagtatggttctgtatctaccaacctccagagcggcaacacacaagcagctacctcagatgtcaacacacaaggcgttcttccaggcatggtctggcaggacagagacgtgtacctgcaggggcccatctgggcaaagattccacacacggacggacattttcacccctctcccctcgtgggcggattcggacttaaacaccctcctccacaaattctcatcaagaacaccccggtacctgcgaatccttcgaccactttcagtgcggcaaagtttgcttccttcatcacacagtactccacggggcaggtcagcgtggagatcgagtgggagctgcagaaggagaacagcaaacgctggaatcccgaaattcagtacacttccaactacaacaaatctgttaatgtggactttactgtggacactaatggtgtgtattcagagcctcgccccattggcaccagatacctgactcgtaatctgtaa

SEQ ID NO: 216 - protein, 735 aa, Artificial Sequence
  Description of Artificial Sequence: Synthetic polypeptide
MAADGYLPDWLEDTLSEGIRQWWKLKPGPPPPKPAERHKDDSRGLVLPGYKYLGPFNGLDKGEPVNEADAAALEHDKAYDRQLDSGDNPYLKYNHADAEFQERLKEDTSFGGNLGRAVFQAKKRILEPLGLVEEPVKTAPGEKRPVEHSPAEPDSSSGTGKAGQQPARKRLNFGQTGDADSVPDPQPLGQPPAAPSGLGTNTMASGSGAPMADNNEGADGVGNSSGNWYCDSTWMGDRVITTSTRTWALPTYNNHLYKQISSQSGASNDNHYFGYSTPWGYFDFNRFHCHFSPRDWQRLINNNWGFRPKRLSFKLFNIQVKEVTQNDGTTTIANNLTSTVQVFTDSEYQLPYVLGSAHQGCLPPFPADVFMVPQYGYLTLNNGSQAVGRSSFYCLEYFPSQMLRTGNNFTFSYTFEDVPFHSSYAHSQSLDRLMNPLIDQYLYYLSRTNTPSGTTTMSRLQFSQAGASDIRDQSRNWLPGPCYRQQRVSKTAADNNNSDYSWTGATKYHLNGRDSLVNPGPAMASHKDDEEKYFPQSGVLIFGKQDSGKTNVDIEKVMITDEEEIRTTNPVATEQYGSVSTNLQSGNTQAATSDVNTQGVLPGMVWQDRDVYLQGPIWAKIPHTDGHFHPSPLVGGFGLKHPPPQILIKNTPVPANPSTTFSAAKFASFITQYSTGQVSVEIEWELQKENSKRWNPEIQYTSNYNKSVNVDFTVDTNGVYSEPRPIGTRYLTRNL

SEQ ID NO: 217 - DNA, 2209 bp, Artificial Sequence
  Description of Artificial Sequence: Synthetic polynucleotide
atggctgccgatggttatcctccagattggctcgaggacactctctctgaagggataagacagtggtggaagctcaaacctggcccaccaccaccaaagcccgcagagcggcataaggacgacagcaggggtcttgtgcttcctgggtacaagtacctcggacccttcaacggactcgacaagggggagccggtcaacgaggcagacgccgcggccctcgagcacgacaaggcctacgaccggcagctcgacagcggagacaacccgtacctcaagtacaaccacgccgacgcagagtttcaggagcgccttaaagaagatacgtcttttgggggcaacctcggacgagcagtcttccaggcgaaaaagagggttcttgaacctctgggcctggttgaggaacctgttaagacggctccgggaaaaaagaggccggtagagcactctcctgtggagccagactcctcctcgggaaccggaaaagcgggccagcggcctgcaagaaaaagattaaattttggtcagactggagacgcagactccgtacctgacccccagcctctcggacagccaccagcagccccctctggtctgggatctactacaatggctacaggcagtggcgcaccaatggcagacaataacgagggtgccgatggagtgggtaattcctcaggaaattggcattgcgattcccaatggctgggcgacagagtcatcaccaccagcacccgaacctgggccctgcccacatacaacaaccacctctacaagcaaatctccagccaatcaggagccagcaacgacaaccactactttggctacagcaccccctgggggtattttgacttcaacagattccactgccacttttcaccacgtgactggcaaagactcatcaacaacaactggggattccggcccaaaagactcaacttcaagctctttaatattcaagtcaaagaggtcacgcagaatgacggtacgacgacgattgccaataaccttaccagcacggttcaggtgtttactgactcggagtaccagctcccgtacgtcctgggctcggcgcatcaaggatgcctcccgccgtttccagcggacgtcttcatggtcccacagtatggatacctcaccctgaacaacgggagtcaggcggtaggacgctcttccttttactgcctggagtactttccttctcagatgctgcgtactggaaacaactttcagttcagctacacttttgaagacgtgcctttccacagcagctacgctcacagccagagtctggatcggctgatgaatcctctgatcgaccagtacctgtattatctgaacaagacacaaacaaatagtggaactcttcagcagtctcggctactgtttagccaagctggaccaaccaacatgtctcttcaagctaaaaactggctgcctggaccttgctacagacagcagcgtctgtcaaaacaggcaaacgacaacaacaacagcaactttccctggactgcagctacaaagtatcatctaaatggccgggactcgttggttaatccaggaccagctatggccagtcacaaggatgacgaagaaaagtttttccccatgcatggaaccctgatatttggtaaacaaggaacaaatgccaacgacgcggatttggaaaatgtcatgattacagatgaagaagaaatcagggccaccaatcccgtggctacggagcagtacgggactgtgtcaaataatttgcaaaactcaaacactggtccaactactggaactgtcaatcgccaaggagcgttacctggtatggtgtggcaggatcgagacgtgtacctgcagggacccatttgggccaagattcctcacaccgatggacactttcatccttctccactgatgggaggttttggactcaaacacccgcctcctcagatcatgatcaaaaacactcccgttccagccaatcctcccacaaacttcagttctgccaagtttgcttctttcatcacacagtattccacgggacaggtcagcgtggagatcgagtgggagctgcagaaggagaacagcaaacgctggaatcccgaaattcagtacacttccaactacaacaagtctgttaatgtggactttactgtggacactaatggtgtgtattcagagcctcgccccattggcaccagatacctgactcgtaatctgtaat

SEQ ID NO: 218 - protein, 735 aa, Artificial Sequence
  Description of Artificial Sequence: Synthetic polypeptide
MAADGYPPDWLEDTLSEGIRQWWKLKPGPPPPKPAERHKDDSRGLVLPGYKYLGPFNGLDKGEPVNEADAAALEHDKAYDRQLDSGDNPYLKYNHADAEFQERLKEDTSFGGNLGRAVFQAKKRVLEPLGLVEEPVKTAPGKKRPVEHSPVEPDSSSGTGKAGQRPARKRLNFGQTGDADSVPDPQPLGQPPAAPSGLGSTTMATGSGAPMADNNEGADGVGNSSGNWHCDSQWLGDRVITTSTRTWALPTYNNHLYKQISSQSGASNDNHYFGYSTPWGYFDFNRFHCHFSPRDWQRLINNNWGFRPKRLNFKLFNIQVKEVTQNDGTTTIANNLTSTVQVFTDSEYQLPYVLGSAHQGCLPPFPADVFMVPQYGYLTLNNGSQAVGRSSFYCLEYFPSQMLRTGNNFQFSYTFEDVPFHSSYAHSQSLDRLMNPLIDQYLYYLNKTQTNSGTLQQSRLLFSQAGPTNMSLQAKNWLPGPCYRQQRLSKQANDNNNSNFPWTAATKYHLNGRDSLVNPGPAMASHKDDEEKFFPMHGTLIFGKQGTNANDADLENVMITDEEEIRATNPVATEQYGTVSNNLQNSNTGPTTGTVNRQGALPGMVWQDRDVYLQGPIWAKIPHTDGHFHPSPLMGGFGLKHPPPQIMIKNTPVPANPPTNFSSAKFASFITQYSTGQVSVEIEWELQKENSKRWNPEIQYTSNYNKSVNVDFTVDTNGVYSEPRPIGTRYLTRNL

SEQ ID NO: 219 - DNA, 2208 bp, Artificial Sequence
  Description of Artificial Sequence: Synthetic polynucleotide
atggctgccgatggttatcttccagattggctcgaggacactctctctgaaggaataagacagtggtggaagctcaaacctggcccaccaccaccaaagcccgcagagcggcataaggacgacagcaggggtcttgtgcttcctgggtacaggtacctcggacccttcaacggactcgacaagggagagccggtcaacgaggcagacgccgcggccctcgagcacgacaaggcctacgaccggcagctcgacagcggagacaacccgtacctcaagtacaaccacgtcgacgcggagtttcaggagcgtcttaaagaagatacgtcttttgggggcaacctcggacgagcagtcttccaggccaaaaagaggattcttgaacctctgggcctggttgaggaacctgttaaggcggctccgggagaaaagaggccggtagagcactctcctgcggagccagactcctcctcgggaaccggaaaagcgggccagcagcctgcaagaaagagattgaattttggtcagactggagacgcagactcagtacctgacccccagcctctcggacagccaccagcagccccctctggtctgggaactaatacgatggcttcaggcagtggcgcaccaatggcagacaataacgagggcgccgacggagtgggtaattcctcgggaaattggcattgcgattccacatggatgggcgacagagtcatcaccaccagcacccgcacctgggccctgcccacctacaacaaccatctgtacaagcaaatctccagccagtctggagccagcaacgacaaccactactttggctacagcaccccctgggggcattttgacttcaacagattccactgccacttctccccacgtgactggcaaagactcatcaacaacaactggggattccggcccaagagactcagcttcaagctctttaacattcaagtcaaagaggtcacgcagaatgacggtacgacgacgattgccaataaccttaccagcacggttcaggtgtttactgactcggagtaccagctcccgtacgtcctcggctcggcgcatcaaggatgcctcccgccgttcccagcagacgtcttcatggtgccacagtatggatacctcaccctgaacaacggcagtcaggcggtaggacgctcttccttttactgcctggagtactttccttctcagatgcttcgtaccggaaacaactttaccttcagctacacctttgaagacgttcctttccatagcagctacgctcacagccaaagtctggaccgtctcatgaatcctctcatcgaccagtacctgtattacttgagcagaacaaacactccaagcggaaccaccacgatgtccaggcttcagttttctcaggccggagcaagtgacattcgggaccagtctagaaactggcttcctggaccctgttaccgccagcagcgagtatcaaagacagctgcggacaacaacaacagtgattactcgtggactggagctaccaagtaccacctcaatggaagagactctctggtgaatccgggcccagctatggccagccacaaggacgatgaagaaaaatattttcctcagagcggggttctcatctttggaaaacaagactcgggaaaaactaatgtggacattgaaaaggttatgattacagacgaagaggaaatcaggaccaccaatcccgtggctacggagcagtatggttctgtatctaccaacctccagagcggcaacacacaagcagctacctcagatgtcaacacacaaggcgttcttccaggcatggtctggcaggacagagacgtgtacctgcaggggcccatctgggcaaagattccacacacggacggacattttcacccctctccccccatgggcggattcggacttaaacaccctcctccacaaattctcatcaagaacaccccggtacctgcgaatccttcgaccactttcagtgcggcaaagtttgcttccttcatcacacagtactccacggggcaggtcagcgtggagatcgagtgggagctgcagaaggagaacagcaaacgctggaatcccgaaattcagtacacttccaactacaacaaatctgttaatgtggactttactgtggacactaatggtgtgtattcagagcctcgccccattggcgccagatacctgactcgtaatctgtaa

SEQ ID NO: 220 - protein, 735 aa, Artificial Sequence
  Description of Artificial Sequence: Synthetic polypeptide
MAADGYLPDWLEDTLSEGIRQWWKLKPGPPPPKPAERHKDDSRGLVLPGYRYLGPFNGLDKGEPVNEADAAALEHDKAYDRQLDSGDNPYLKYNHVDAEFQERLKEDTSFGGNLGRAVFQAKKRILEPLGLVEEPVKAAPGEKRPVEHSPAEPDSSSGTGKAGQQPARKRLNFGQTGDADSVPDPQPLGQPPAAPSGLGTNTMASGSGAPMADNNEGADGVGNSSGNWHCDSTWMGDRVITTSTRTWALPTYNNHLYKQISSQSGASNDNHYFGYSTPWGHFDFNRFHCHFSPRDWQRLINNNWGFRPKRLSFKLFNIQVKEVTQNDGTTTIANNLTSTVQVFTDSEYQLPYVLGSAHQGCLPPFPADVFMVPQYGYLTLNNGSQAVGRSSFYCLEYFPSQMLRTGNNFTFSYTFEDVPFHSSYAHSQSLDRLMNPLIDQYLYYLSRTNTPSGTTTMSRLQFSQAGASDIRDQSRNWLPGPCYRQQRVSKTAADNNNSDYSWTGATKYHLNGRDSLVNPGPAMASHKDDEEKYFPQSGVLIFGKQDSGKTNVDIEKVMITDEEEIRTTNPVATEQYGSVSTNLQSGNTQAATSDVNTQGVLPGMVWQDRDVYLQGPIWAKIPHTDGHFHPSPPMGGFGLKHPPPQILIKNTPVPANPSTTFSAAKFASFITQYSTGQVSVEIEWELQKENSKRWNPEIQYTSNYNKSVNVDFTVDTNGVYSEPRPIGARYLTRNL

SEQ ID NO: 221 - DNA, 2208 bp, Artificial Sequence
  Description of Artificial Sequence: Synthetic polynucleotide
atggctgccgatggttatcttccagattggctcgaggacaccctctctgaaggaataagacagtggtggaagctcaaacctggcccaccaccaccaaagcccgcagagcggcataaggacgacagcaggggtcttgtgcttcctgggtacaagtacctcggacccttcaacggactcgacaagggagagccggtcaacgaggcagacgccgcggccctcgagcacgacaaggcctacgaccggcagctcgacagcggagataacccgtacctcaagtacaaccacgccgacgcggagtttcaggagcgccttaaagaggatacgtcttttgggggcaacctcggacgagcagtcttccaggccaaaaagaggattcttgaacctctgggcctggttgaggaacctgttaagacggctccgggaaaaaagaggccggtagagcactctcctgcggagccagactcctcctcgggaaccggaaaagcgggccagcagcctgcaagaaagagattgaattttggtcagactggagacgcagactcagtacctgacccccggcctctcggacagccaccagcagccccctctggtctgggaactaatacgatggcttcaggcagtggcgcaccaatggcagacaataacgagggcgccgacggagtgggtaattcctcgggaaattggcattgcgattccacatggatgggcgacagagtcatcaccaccagcacccgcacctgggccctgcccacctacaacaaccatctgtacaagcaaatctccagccagtctggagccagcaacgacaaccactactttggctacagcaccccctgggggtattttgacttcaacagattccactgccacttctccccacgtgactggcaaagactcatcaacaacaactggggattccggcccaagagactcagcttcaagctctttaacattcaagtcaaagaggtcacgcagaatgacggtacgacgacgattgccaataaccttaccagcacggttcaggtgtttactgactcggagtaccagctcccgtacgtcctcggctcggcgcatcaaggatgcctcccgccgttcccagcagacgtcttcatggtgccacagtatggatacctcaccctgaacaacggcagtcaggcggtaggacgctcttccttttactgcctggagtactttccttctcagatgcttcgtaccggaaacaactttaccttcagctacacctttgaagacgttcctttccatagcagctacgctcacagccaaagtctggaccgtctcatgaatcctctcatcgaccagtacctgtattacttgagcagaacaaacactccaagcggaaccaccacgatgtccaggcttcagttttctcaggccggagcaagtgacattcgggaccagtctagaaactggcttcctggaccctgttaccgccagcagcgagtatcaaagacagctgcggacaacaacaacagtgattactcgtggactggagctaccaagtaccacctcaatggaagagactctctggtgaatccgggcccagctatggccagccacaaggacgatgaagaaaaatattttcctcagagcggggttctcatctttggaaaacaagactcgggaaaaactaatgtggacattgaaaaggttatgattacagacgaagaggaaatcaggaccaccaatcccgtggctacggagcagtatggttctgtatctaccaacctccagagcggcaacacacaagcagctacctcagatgtcaacacacaaggcgttcttccaggcatggtctggcaggacagagacgtgtacctgcaggggcccatctgggcaaagattccacacacggacggacattttcacccctctcccctcatgggcggattcggacttaaacaccctcctccacaaattctcatcaagaacaccccggtacctgcgaatccttcgaccactttcagtgcggcaaagtttgcttccttcatcacacagtactccacggggcaggtcagcgtggagatcgagtgggagctgcagaaggagaacagcaaacgctggaatcccgaaattcagtacacttccaactacaacaaatctgttaatgtggactttactgtggacactaatggtgtgtattcagagcctcgccccattggcaccagatacctgactcgtaatctgtaa

SEQ ID NO: 222 - protein, 735 aa, Artificial Sequence
  Description of Artificial Sequence: Synthetic polypeptide
MAADGYLPDWLEDTLSEGIRQWWKLKPGPPPPKPAERHKDDSRGLVLPGYKYLGPFNGLDKGEPVNEADAAALEHDKAYDRQLDSGDNPYLKYNHADAEFQERLKEDTSFGGNLGRAVFQAKKRILEPLGLVEEPVKTAPGKKRPVEHSPAEPDSSSGTGKAGQQPARKRLNFGQTGDADSVPDPRPLGQPPAAPSGLGTNTMASGSGAPMADNNEGADGVGNSSGNWHCDSTWMGDRVITTSTRTWALPTYNNHLYKQISSQSGASNDNHYFGYSTPWGYFDFNRFHCHFSPRDWQRLINNNWGFRPKRLSFKLFNIQVKEVTQNDGTTTIANNLTSTVQVFTDSEYQLPYVLGSAHQGCLPPFPADVFMVPQYGYLTLNNGSQAVGRSSFYCLEYFPSQMLRTGNNFTFSYTFEDVPFHSSYAHSQSLDRLMNPLIDQYLYYLSRTNTPSGTTTMSRLQFSQAGASDIRDQSRNWLPGPCYRQQRVSKTAADNNNSDYSWTGATKYHLNGRDSLVNPGPAMASHKDDEEKYFPQSGVLIFGKQDSGKTNVDIEKVMITDEEEIRTTNPVATEQYGSVSTNLQSGNTQAATSDVNTQGVLPGMVWQDRDVYLQGPIWAKIPHTDGHFHPSPLMGGFGLKHPPPQILIKNTPVPANPSTTFSAAKFASFITQYSTGQVSVEIEWELQKENSKRWNPEIQYTSNYNKSVNVDFTVDTNGVYSEPRPIGTRYLTRNL

SEQ ID NO: 223 - DNA, 2208 bp, Artificial Sequence
  Description of Artificial Sequence: Synthetic polynucleotide
atggctgccgatggttatcttccagattggctcgaggacactctctctgaaggaataagacagtggtggaagctcaaacctggcccaccaccaccaaagcccgcagagcggcataaggacgacagcaggggtcttgtgcttcctgggtacaagtacctcggacccttcaacggactcgacaagggagagccggtcaacgaggcagacgccgcggccctcgagcacgacaaggcctacgaccggcagctcgacagcggagacaacccgtacctcaagtacaaccacgccgacgcggagtttcaggagcgccttaaaggagatacgtcttttgggggcaacctcggacgagcagtcttccaggccaaaaagaggattcttgaacctctgggcctggttgaggaacctgttaagacggctccgggaaaaaagaggccggtagagcactctcctgcggagccagactcctcctcgggaaccggaaaagcgggccagcagcctgcaagaaagagattgaattttggtcagactggagacgcagactcagtacctgacccccagcctctcggacagccaccagcagccccctctggtctgggaactaatacgatggcttcaggcagtggcgcaccaatggcagacaataacgagggcgccgacggagtgggtaattcctcgggaaattggcattgcgattccacatggatgggcggcagagtcatcaccaccagcacccgcacctgggccctgcccacctacaacaaccatctgtacaagcaaatctccagccagtctggagccagcaacgacaaccactactttggctacagcaccccctgggggtattttgacttcaacagattccactgccacttctccccacgtgactggcaaagactcatcaacaacaactggggattccggcccaagagactcagcttcaagctctttaacattcaagtcaaagaggtcacgcagaatgacggtacgacgacgattgccaataaccttaccagcacggttcaggtgtttactgactcggagtaccagctcccgtacgtcctcggctcggcgcatcaaggatgcctcccgccgttcccagcagacgtcttcatggtgccacagtatggatacctcaccctgaacaacggcagtcaggcggtaggacgctcttccttttactgcctggagtactttccttctcagacgcttcgtaccggaaacaactttaccttcagctacacctttgaagacgttcctttccatagcagctacgctcacagccaaagtctggaccgtctcatgaatcctctcatcgaccagtacctgtattacttgagcagaacaaacactccaagcggaaccaccacgatgtccaggcttcagttttctcaggccggagcaagtgacattcgggaccagtctagaaactggcttcctggaccctgttaccgccagcagcgagtatcaaagacagctgcggacaacaacaacagtgattactcgtggactggagctaccaagtaccacctcaatggaagagactctctggtgaatccgggcccagctatggccagccacaaggacgatgaagaaaaatattttcctcagagcggggttctcatctttggaaaacaagactcgggaaaaactaatgtggacattgaaaaggttatgattacagacgaagaggaaatcaggaccaccaatcccgtggctacggagcagtatggttctgtatctaccaacctccagagcggcaacacacaagcagctacctcagatgtcaacacacaaggcgttcttccaggcatggtctggcaggacagagacgtgtacctgcaggggcccatctgggcaaagattccacacacggacggacattttcacccctctcccctcatgggcggattcggacttaaacaccctcctccacaaattctcatcaagaacaccccggtacctgcgaatccttcgaccactttcagtgcggcaaagtttgcttccttcatcacacagtactccacggggcaggtcagcgtggagatcgagtgggagctgcagaaggagaacagcaaacgctggaatcccgaaattcagtacacttccaactacaacaaatctgttaatgtggactttactgtggacactaatggtgtgtattcagagcctcgccccattggcaccagatacctgactcgtaatctgtaa

SEQ ID NO: 224 - protein, 735 aa, Artificial Sequence
  Description of Artificial Sequence: Synthetic polypeptide
MAADGYLPDWLEDTLSEGIRQWWKLKPGPPPPKPAERHKDDSRGLVLPGYKYLGPFNGLDKGEPVNEADAAALEHDKAYDRQLDSGDNPYLKYNHADAEFQERLKGDTSFGGNLGRAVFQAKKRILEPLGLVEEPVKTAPGKKRPVEHSPAEPDSSSGTGKAGQQPARKRLNFGQTGDADSVPDPQPLGQPPAAPSGLGTNTMASGSGAPMADNNEGADGVGNSSGNWHCDSTWMGGRVITTSTRTWALPTYNNHLYKQISSQSGASNDNHYFGYSTPWGYFDFNRFHCHFSPRDWQRLINNNWGFRPKRLSFKLFNIQVKEVTQNDGTTTIANNLTSTVQVFTDSEYQLPYVLGSAHQGCLPPFPADVFMVPQYGYLTLNNGSQAVGRSSFYCLEYFPSQTLRTGNNFTFSYTFEDVPFHSSYAHSQSLDRLMNPLIDQYLYYLSRTNTPSGTTTMSRLQFSQAGASDIRDQSRNWLPGPCYRQQRVSKTAADNNNSDYSWTGATKYHLNGRDSLVNPGPAMASHKDDEEKYFPQSGVLIFGKQDSGKTNVDIEKVMITDEEEIRTTNPVATEQYGSVSTNLQSGNTQAATSDVNTQGVLPGMVWQDRDVYLQGPIWAKIPHTDGHFHPSPLMGGFGLKHPPPQILIKNTPVPANPSTTFSAAKFASFITQYSTGQVSVEIEWELQKENSKRWNPEIQYTSNYNKSVNVDFTVDTNGVYSEPRPIGTRYLTRNL

SEQ ID NO: 225 - DNA, 2208 bp, Artificial Sequence
  Description of Artificial Sequence: Synthetic polynucleotide
atggctgccgatggttatcttccagattggctcgaggacactctctctgaaggaataagacagtggtggaagctcaaacctggcccaccaccaccaaagcccgcagagcggcataaggacgacagcaggggtcttgtgcttcctgggtacaagtacctcggacccttcaacggactcgacaagggagagccggtcaacgaggcagacgccgcggccctcgagcacgacaaggcctacgaccggcagctcgacagcggagacaacccgtacctcaagtacaaccacgccgacgcggagtttcaggagcgtcttaaagaagatacgtcttttgggggcaacctcggacgagcagtcttccaggccaaaaagaggattcttgaacctctgggcctggttgaggaacctgttaagacggctccgggaaaaaagaggccggtagagcactctcctgcggagccagactcctcctcgggaaccggaaaagcgggccagcagcctgcaagaaagagattgaattttggtcagactggagacgcagactcagtacctgacccccagcctctcggacagccaccagcagccccctctggtctgggaactaatacgatggcttcaggcagtggcgcaccaatggcagacaataacgagggcgccgacggagtgggtaattcctcgggaaattggcattgcgattccacatggatgggcgacagagtcatcaccaccagcacccgcacctgggccctgcccacctgcaacaaccatctgtacaagcaaatctccagccagtctggagccagcaacgacaaccactactttggctacagcaccccctgggggtattttgacttcaacagattccactgccacttctccccacgtgactggcaaagactcatcaacaacaactggggattccggcccaagagactcagcttcaagctctttaacattcaagtcaaagaggtcacgcagaatgacggtacgacgacgattgccaataaccttaccagcacggttcaggtgtttactgactcggagtaccagctcccgtacgtcctcggctcggcgcatcaaggatgcctcccgccgttcccagcagacgtcttcatggtgccacagtatggatacctcaccctgaacaacggcagtcaggcggtaggacgctcttccttttactgcctggagtattttccttctcagatgcttcgtaccggaaacaactttaccttcagctacacctttgaagacgttcctttccatagcagctacgctcacagccaaagtctggaccgtctcatgaatcctctcatcgaccagtacctgtattacttgagcagaacaaacactccaagcggaaccaccacgatgtccaggcttcagttttctcaggccggagcaagtgacattcgggaccagtctagaaactggcttcctggaccctgttaccgccagcagcgagtatcaaagacagctgcggacaacaacaacagtgattactcgtggactggagctaccaagtaccacctcaatggaagagactctctggtgaatccgggcccagctatggccagccacaaggacgatgaagaaaaatattttcctcagagcggggttctcatctttggaaaacaagactcgggaaaaactaatgtggacattgaaaaggttatgattacagacgaagaggaaatcaggaccaccaatcccgtggctacggagcagtatggttctgtatctacctacctccagagcggcaacacacaagcagctacctcagatgtcaacacacaaggcgttcttccaggcatggtctggcaggacagagacgtgtacctgcgggggcccatctgggcaaagattccacacacggacggacattttcacccctctcccctcatgggcggatttggacttaaacaccctcctccacaaattctcatcaagaacaccccggtacctgcgaatccttcgaccactttcagtgcggcaaagtttgcttccttcatcacacagtactccacggggcaggtcagcgtggagatcgagtgggagctgcagaaggagaacagcaaacgctggaatcccgaaattcagtacacttccaactacaacaaatctgttaatgtggactttactgtggacactaatggtgtgtattcagagcctcgccccattggcaccagatacctgactcgtaatctgtaa

SEQ ID NO: 226 - protein, 735 aa, Artificial Sequence
  Description of Artificial Sequence: Synthetic polypeptide
MAADGYLPDWLEDTLSEGIRQWWKLKPGPPPPKPAERHKDDSRGLVLPGYKYLGPFNGLDKGEPVNEADAAALEHDKAYDRQLDSGDNPYLKYNHADAEFQERLKEDTSFGGNLGRAVFQAKKRILEPLGLVEEPVKTAPGKKRPVEHSPAEPDSSSGTGKAGQQPARKRLNFGQTGDADSVPDPQPLGQPPAAPSGLGTNTMASGSGAPMADNNEGADGVGNSSGNWHCDSTWMGDRVITTSTRTWALPTCNNHLYKQISSQSGASNDNHYFGYSTPWGYFDFNRFHCHFSPRDWQRLINNNWGFRPKRLSFKLFNIQVKEVTQNDGTTTIANNLTSTVQVFTDSEYQLPYVLGSAHQGCLPPFPADVFMVPQYGYLTLNNGSQAVGRSSFYCLEYFPSQMLRTGNNFTFSYTFEDVPFHSSYAHSQSLDRLMNPLIDQYLYYLSRTNTPSGTTTMSRLQFSQAGASDIRDQSRNWLPGPCYRQQRVSKTAADNNNSDYSWTGATKYHLNGRDSLVNPGPAMASHKDDEEKYFPQSGVLIFGKQDSGKTNVDIEKVMITDEEEIRTTNPVATEQYGSVSTYLQSGNTQAATSDVNTQGVLPGMVWQDRDVYLRGPIWAKIPHTDGHFHPSPLMGGFGLKHPPPQILIKNTPVPANPSTTFSAAKFASFITQYSTGQVSVEIEWELQKENSKRWNPEIQYTSNYNKSVNVDFTVDTNGVYSEPRPIGTRYLTRNL

SEQ ID NO: 227 - DNA, 2208 bp, Artificial Sequence; identical to SEQ ID NO: 221
  Description of Artificial Sequence: Synthetic polynucleotide

SEQ ID NO: 228 - protein, 735 aa, Artificial Sequence; identical to SEQ ID NO: 222
  Description of Artificial Sequence: Synthetic polypeptide

SEQ ID NO: 229 - DNA, 2208 bp, Artificial Sequence
  Description of Artificial Sequence: Synthetic polynucleotide
atggctgccgatggttatcttccagattggctcgaggacactctctctgaaggaataagacagtggtggaagctcaaacctggcccaccaccaccaaagcccgcagagcggcataaggacggcagcaggggtcttgtgcttcctgggtacaagtacctcggacccttcaacggactcgacaagggagagccggtcaacgaggcagacgccgcggccctcgagcacgacaaggcctacgaccggcagctcaacagcggagacaacccgtacctcaagtacaaccacgccgacgcggagtttcaggagcgccttaaagaagatacgtcttttgggggcaacctcggacgagcagtcttccaggcaaaaaagagggttcttgaacctctgggcctggttgaggagcctgttaaaacggctccgggaaaaaagagaccggtagagcactctcctgcggagccagactcctcctcgggaaccggaaaagcgggccagcagcctgcaagaaagagattgaattttggtcagactggagacgcagactccgtacctgacccccagcctctcggacagccaccagcagccccctctggtctgggatctactacaatggctacaggcagtggcgcaccaatggcagacaataacgagggtgccgatggagtgggtaattcctcaggaaattggcattgcgattcccaatggctgggcgacagagtcatcaccacaagcactcgaacctgggccctgcccacctacaacaaccacctctacaagcaaatctccagccaatcaggagcctcaaacgacaaccactattttggctacagcaccccttgggggtattttgacttcaacagattccactgccacttttcaccacgtgactggcaaagactcatcaacaacaactggggattccgacccaagagactcaacttcaagctctttaacattcaagtcaaagaggtcacgcagaatgacggtacgacgacgattgccaataaccttaccagcacggttcaggtgtttactgactcggagtaccagctcccgtacgtcctcggctcggcgcatcaaggatgcctcccgccgttcccagcggacgtcttcatggtcccacagtatggatacctcaccctgaacaacgggagtcaggcggtaggacgctctcccttttactgcctggagtactttccttctcagatgctgcgtactggaaacaactttcagttcagctacacttttgaagacgtgcctttccacagcagctacgctcacagccagagtctggatcggctgatgaatcctctgatcgaccagtacctgtattatctgaacaagacacaaacaaatagtggaactcttcagcagtctcggctactgtttagccaagctggacccaccaacatgtctcttcaagctaaaaactggctgcctggaccttgctacagacagcagcgtctgtcaaagcaggcaaacgacaacaacaacagcaactttccctggactgcagctacaaagtatcatctaaatggccgggactcgttggttaatccaggaccagctatggccagtcacaaggatgacgaagaaaagtttttccccatgcatggaaccctgatatttggtaaacaaggaacaaatgccaacgacgcggatttggaaaatgtcatgattacagatgaagaagaaatcaggaccaccaatcccgtggctacggagcagtacgggactgtgtcaaataatttgcaaaactcaaacactggtccaactactggaactgtcaatcaccaaggagcgttacctggtatggtgtggcaggatcgagatgtgtaccttcagggacccatttgggccaagattcctcacaccgatggacactttcatccttctccactgatgggaggttttggactcaaacacccgcctcctcagattatgatcaaaaacactcccgttccagccaatcctcctacaaacttcagttctgccaagtttgcttctttcatcacacagtattccacggggcaggtcagcgtggagatcgagtgggagctgcagaaggagaacagcaaacgctggaatcccgaaattcagtacacttccaactacaacaaatctgttaatgtggactttactgtggacaataatggcgtgtactcagagcctcgccccattggcaccagatacctgactcgtaatctgtaa

SEQ ID NO: 230 - protein, 735 aa, Artificial Sequence
  Description of Artificial Sequence: Synthetic polypeptide
MAADGYLPDWLEDTLSEGIRQWWKLKPGPPPPKPAERHKDGSRGLVLPGYKYLGPFNGLDKGEPVNEADAAALEHDKAYDRQLNSGDNPYLKYNHADAEFQERLKEDTSFGGNLGRAVFQAKKRVLEPLGLVEEPVKTAPGKKRPVEHSPAEPDSSSGTGKAGQQPARKRLNFGQTGDADSVPDPQPLGQPPAAPSGLGSTTMATGSGAPMADNNEGADGVGNSSGNWHCDSQWLGDRVITTSTRTWALPTYNNHLYKQISSQSGASNDNHYFGYSTPWGYFDFNRFHCHFSPRDWQRLINNNWGFRPKRLNFKLFNIQVKEVTQNDGTTTIANNLTSTVQVFTDSEYQLPYVLGSAHQGCLPPFPADVFMVPQYGYLTLNNGSQAVGRSPFYCLEYFPSQMLRTGNNFQFSYTFEDVPFHSSYAHSQSLDRLMNPLIDQYLYYLNKTQTNSGTLQQSRLLFSQAGPTNMSLQAKNWLPGPCYRQQRLSKQANDNNNSNFPWTAATKYHLNGRDSLVNPGPAMASHKDDEEKFFPMHGTLIFGKQGTNANDADLENVMITDEEEIRTTNPVATEQYGTVSNNLQNSNTGPTTGTVNHQGALPGMVWQDRDVYLQGPIWAKIPHTDGHFHPSPLMGGFGLKHPPPQIMIKNTPVPANPPTNFSSAKFASFITQYSTGQVSVEIEWELQKENSKRWNPEIQYTSNYNKSVNVDFTVDNNGVYSEPRPIGTRYLTRNL

SEQ ID NO: 231 - DNA, 2208 bp, Artificial Sequence
  Description of Artificial Sequence: Synthetic polynucleotide
atggctgccgatggttatcttccagattggctcgaggacactctctctgaaggaataagacagtggtggaagctcaaacctggcccaccaccaccaaagcccgcagagcggcataaggacgacagcaggggtcttgtgcttcctgggtacaagtacctcggacccttcaacggactcgacaagggagagccggtcaacgaggcagacgccgcggccctcgagcacgacaaggcctacgaccggcagctcgacagcggagacaacccgtacctcaagtacaaccacgccgacgcggagtttcaggagcgtcttaaagaagatacgtcttttgggggcaacctcggacgagcagtcttccaggccaaaaagaggattcttgaacctctgggcctggttgaggaacctgttaagacggctccgggaaaaaagaggccggtagagcactctcctgcggagccagactcctcctcgggaaccggaaaagcgggccagcagcctgcaagaaagagattgaattttggtcagactggagacgcagactcagtacctgacccccagcctctcggacagccaccagcagccccctctggtctgggaactaatacgatggcttcaggcagtggcgcaccaatggcagacaataacgagggcgccgacggagtgggtaattcctcgggaaattggcattgcgattccacatggatgggcgacagagtcatcaccaccagcacccgcacctgggccctgcccacctacaacaaccatctgtacaagcaaatctccagccagtctggagccagcaacgacaaccactactttggctacagcaccccctgggggtattttgacttcaacagattccactgccacttctccccacgtgactggcaaagactcatcaacaacaactggggattccggcccaagagactcagcttcaagctctttaacattcaagtcaaagaggtcacgcagaatgacggtacgacgacgattgccaataaccttaccagcacggttcaggtgtttactgactcggagtaccagctcccgtacgtcctcggctcggcgcatcaaggatgcctcccgccgttcccagcagacgtcttcatggtgccacagtatggatacctcaccctgaacaacggcagtcaggcggtaggacgctcttccttttactgcctggagtactttccttctcagatgcttcgtaccggaaacaactttaccttcagctacacctttgaagacgttcctttccatagcagctacgctcacagccaaagtctggaccgtctcatgaatcctctcatcgaccagtacctgtattacttgagcagaacaaacactccaagcggaaccaccacgatgtccaggcttcagttttctcaggccggagcaagtgacattcgggaccagtctagaaactggcttcctggaccctgttaccgccagcagcgagtatcaaagacagctgcggacaacaacaacagtgattactcgtggactggagctaccaagtaccacctcaatggaagagactctctggtgaatccgggcccagctatggccagccacaaggacgatgaagaaaaatattttcctcagagcggggttctcatctttggaaaacaagactcgggaaaaactaatgtggacattgaaaaggttatgattacagacgaagaggaaatcaggaccaccaatcccgtggctacggagcagtatggttctgtatctaccaacctccagagcggcaacacacaagcagctacctcagatgtcaacacacaaggcgttcttccaggcatggtctggcaggacagagacgtgtacctgcaggggcccatctgggcaaagattccacacacggacggacattttcacccctctcccctcatgggcggattcggacttaaacaccctcctccacaaattctcatcaagaacaccccggtacctgcgaatccttcgaccactttcagtgcggcaaagtttgcttccttcatcacacagtactccacggggcaggtcagcgtggagatcgagtgggagctgcagaaggagaacagcaaacgctggaatcccgaaattcagtacacttccaactacaacaaatctgttaatgtggactttactgtggacactaatggtgtgtattcagagcctcgccccattggcaccagatacctgactcgtaatctgtaa

SEQ ID NO: 232 - protein, 735 aa, Artificial Sequence
  Description of Artificial Sequence: Synthetic polypeptide
MAADGYLPDWLEDTLSEGIRQWWKLKPGPPPPKPAERHKDDSRGLVLPGYKYLGPFNGLDKGEPVNEADAAALEHDKAYDRQLDSGDNPYLKYNHADAEFQERLKEDTSFGGNLGRAVFQAKKRILEPLGLVEEPVKTAPGKKRPVEHSPAEPDSSSGTGKAGQQPARKRLNFGQTGDADSVPDPQPLGQPPAAPSGLGTNTMASGSGAPMADNNEGADGVGNSSGNWHCDSTWMGDRVITTSTRTWALPTYNNHLYKQISSQSGASNDNHYFGYSTPWGYFDFNRFHCHFSPRDWQRLINNNWGFRPKRLSFKLFNIQVKEVTQNDGTTTIANNLTSTVQVFTDSEYQLPYVLGSAHQGCLPPFPADVFMVPQYGYLTLNNGSQAVGRSSFYCLEYFPSQMLRTGNNFTFSYTFEDVPFHSSYAHSQSLDRLMNPLIDQYLYYLSRTNTPSGTTTMSRLQFSQAGASDIRDQSRNWLPGPCYRQQRVSKTAADNNNSDYSWTGATKYHLNGRDSLVNPGPAMASHKDDEEKYFPQSGVLIFGKQDSGKTNVDIEKVMITDEEEIRTTNPVATEQYGSVSTNLQSGNTQAATSDVNTQGVLPGMVWQDRDVYLQGPIWAKIPHTDGHFHPSPLMGGFGLKHPPPQILIKNTPVPANPSTTFSAAKFASFITQYSTGQVSVEIEWELQKENSKRWNPEIQYTSNYNKSVNVDFTVDTNGVYSEPRPIGTRYLTRNL

SEQ ID NO: 233 - DNA, 2208 bp, Artificial Sequence
  Description of Artificial Sequence: Synthetic polynucleotide
atggctgccgatggttatcttccagattggctcgaggacactctctctgaaggaataagacagtggtggaagctcaaacctggcccaccaccaccaaagcccgcagagcggcataaggacgacagcaggggtcttgtgcttcctgggtacaagtacctcggacccttcaacggactcgacaagggagagccggtcaacgaggcagacgccgcggccctcgagcacgacaaggcctacgaccggcagctcgacagcggagacaacccgtacctcaagtacaaccacgccgacgcggagtttcaggagcgtcttaaagaagatacgtcttttgggggcaacctcggacgagcagtcttccaggccaaaaagaggattcttgaacctctgggcctggttgaggaacctgttaagacggctccgggaaaaaagaggccggtagagcactctcctgcggagccagactcctcctcgggaaccggaaaagcgggccagcagcctgcaagaaagagattgaattttggtcagactggagacgcagactcagtacctgacccccagcctctcggacagccaccagcagccccctctggtctgggaactaatacgatggcttcaggcagtggcgcaccaatggcagacaataacgagggcgccgacggagtgggtaattcctcgggaaattggcattgcgattccacatggatgggcgacagagtcatcaccaccagcacccgcacctgggccctgcccacctacaacaaccatctgtacaagcaaatctccagccagtctggagccagcaacgacaaccactactttggctacagcaccccctgggggtatttcgacttcaacagattccactgccacttctccccacgtgactggcaaagactcatcaacaacaactggggattccggcccaagagactcagcttcaagctctttaacattcaagtcaaagaggtcacgcagaatgacggtacgacgacgattgccaataaccttaccagcacggttcaggtgtttactgactcggggtaccagctcccgtacgtcctcggctcggcgcatcaaggatgccttccgccgttcccagcagacgtcttcatggtgccacagtatggatacctcaccctgaacaacggcagtcaggcggtaggacgctcttccttttactgcctggagtactttccttctcagatgcttcgtaccggaaacaactttaccttcagctacacctttgaagacgttcctttccatagcagctacgctcacggccaaagtctggaccgtctcatgaatcctctcatcgaccagtacctgtattacttgagcagaacaaacactccaagcggaaccaccacgatgtccaggcttcagttttctcaggccggagcaagtgacgttcgggaccagtctagaaactggcttcctggaccctgttaccgccagcagcgagtatcaaagacagctgcggacaacaacaacagtgattactcgtggactggagctaccaagtaccacctcaatggaagagactctctggtgaatccgggcccagctatggccagccacaaggacgatgaagaaaaatattttcctcagagcggggttctcgtctttggaaaacaagactcgggaaaaactaatgtggacattgaaaaggttatgattacagacgaagaggaaatcaggaccaccaatcccgcggctacggagcagtatggttctgtatctaccaacctccagagcggcaacacacaagcagctacctcagatgtcaacacacaaggcgttcttccaggcatggtctggcaggacagagacgtgtacctgcaggggcccatctgggcaaagattccacacacggacggacattttcacccctctcccctcatgggcggattcggacttaaacaccctcctccacaaattctcatcaagaacaccccggtacctgcgaatccttcgaccactttcagtgcggcaaagtttgtttccttcatcacacagtactccacggggcaggtcagcgtggagatcgagtgggagctgcagaaggagaacagcaaacgctggaatcccgaaattcagtacacttccaactacaacaaatctgttaatgtggactttactgtggacactaatggtgtgtattcagagcctcgccccattggcaccagatacctgactcgtaatctgtaa

SEQ ID NO: 234 - protein, 735 aa, Artificial Sequence
  Description of Artificial Sequence: Synthetic polypeptide
MAADGYLPDWLEDTLSEGIRQWWKLKPGPPPPKPAERHKDDSRGLVLPGYKYLGPFNGLDKGEPVNEADAAALEHDKAYDRQLDSGDNPYLKYNHADAEFQERLKEDTSFGGNLGRAVFQAKKRILEPLGLVEEPVKTAPGKKRPVEHSPAEPDSSSGTGKAGQQPARKRLNFGQTGDADSVPDPQPLGQPPAAPSGLGTNTMASGSGAPMADNNEGADGVGNSSGNWHCDSTWMGDRVITTSTRTWALPTYNNHLYKQISSQSGASNDNHYFGYSTPWGYFDFNRFHCHFSPRDWQRLINNNWGFRPKRLSFKLFNIQVKEVTQNDGTTTIANNLTSTVQVFTDSGYQLPYVLGSAHQGCLPPFPADVFMVPQYGYLTLNNGSQAVGRSSFYCLEYFPSQMLRTGNNFTFSYTFEDVPFHSSYAHGQSLDRLMNPLIDQYLYYLSRTNTPSGTTTMSRLQFSQAGASDVRDQSRNWLPGPCYRQQRVSKTAADNNNSDYSWTGATKYHLNGRDSLVNPGPAMASHKDDEEKYFPQSGVLVFGKQDSGKTNVDIEKVMITDEEEIRTTNPAATEQYGSVSTNLQSGNTQAATSDVNTQGVLPGMVWQDRDVYLQGPIWAKIPHTDGHFHPSPLMGGFGLKHPPPQILIKNTPVPANPSTTFSAAKFVSFITQYSTGQVSVEIEWELQKENSKRWNPEIQYTSNYNKSVNVDFTVDTNGVYSEPRPIGTRYLTRNL

SEQ ID NO: 235 - DNA, 2208 bp, Artificial Sequence
  Description of Artificial Sequence: Synthetic polynucleotide
atggctgccgatggttatcttccagattggctcgaggacactctctctgaaggaataagacagtggtggaaactcaaacctggcccaccaccaccaaagcccgcagagcggcataaggacgacagcaggggtcttgtgcttcctgggtacaagtacctcggacccttcaacggactcgacaagggagagccggtcaacgaggcagacgccgcggccctcgagcacgacaaggcctacgaccggcagctcgacagcggagacaacccgtacctcaagtacaaccacgccgacgcggagtttcaggagcgccttaaagaagatacgtcttttgggggcaacctcggacgagcagtcttccaggcaaaaaagagggttctggaacctctgagcctggttgaggagcctgttaagacggctccgggaaaaaagaggccggtagagcactctcccgcagagccagattcctcctccggaactggaaagtcgggcaaccagcctgcaagaaagagattgaatttcggtcagactggagactcagactccgtacctgacccccagcctctcggacagccaccagcagccccctctggtctgggaactaatacgatggctacaggcagtggcgcaccaatggcagacaataacgagggcgccgacggagtgggtaattcctcgggaaattggcattgcgattccacatggatgggcgacagagtcatcaccaccagcacccgaacctgggccctgcccacctacaacaaccatctgtacaagcaaatatccagccagtctggagccagcaacgacaatcactactttggctacagcaccccctgggggtattttgacttcaacagattccactgccacttttcaccacgtgactggcaaagactcatcaacaacaactggggattccgacccaagagactcaacttcaagctctttaacattcaagtcaaagaggtcacgcagaatgacggtacgacgacgattgccaataaccttaccagcacggttcaggtgtttactgactcggagtaccagctcccgtacgtcctcggctcggcgcatcaaggatgcctcccgccgttcccagcagacgtcttcatggtgccacagtatggatacctcaccctgaacaacgggagtcaggcagtaggacgctcttcattttactgcctagagtactttccttctcagatgctgcgtaccggaaacaactttaccttcagctacacctttgaggacgttcctttccacagcagctacgctcacagccagagtttggaccgtctcatgaatcctctcatcgaccagtacctgtattacttgagcagaacaaacactccaagcggaaccaccacgcagtccaggcttcagttttctcaggccggagcgagtgacattcaggaccagtctaggaactggcttcctggaccctgttaccgtcagcagcgagtatcaaagacatctgcggataacaacaacagtgaatactcgtggactggagctaccaagtaccacctcaatggcagagactctctggtgaatccgggcccggccatggccagccacaaagacgatgaagaaaagttttttcctcagagcggggttcttatctttgggaagcaaggctcagagaaaacaaatgtggatattgaaaaggtcatgattacagacgaagaggaaatcaggaccaccaatcccgtggctacggagcagtatggttctgtatctaccaacctccagagcggcaacacacaagcagctaccgcagatgtcaacacacaaggcgttcttccaggcatggtcgggcaagacagagacgtgtacctgcaggggcctacttgggcaaagattccacacacggacggacattttcacccctctcccctcatgggcggatttggacttaaacaccctcctccacagattctcatcaagaacaccccggtacctgcgaatccttcgaccaccttcagtgcggcaaagtttgcttccttcattacacagtactccacggggcaggtcagcgtggagatcgagtgggagctgcagaaggagaacagcaaacgctggaatcccgagatccagtacacttccaactacaacaagtctgttaatgtggactttactgtggacactaatggcgtgtattcagagcctcgccccattggcaccagatacctgactcgtaatctgtaa

SEQ ID NO: 236 - protein, 735 aa, Artificial Sequence
  Description of Artificial Sequence: Synthetic polypeptide
MAADGYLPDWLEDTLSEGIRQWWKLKPGPPPPKPAERHKDDSRGLVLPGYKYLGPFNGLDKGEPVNEADAAALEHDKAYDRQLDSGDNPYLKYNHADAEFQERLKEDTSFGGNLGRAVFQAKKRVLEPLSLVEEPVKTAPGKKRPVEHSPAEPDSSSGTGKSGNQPARKRLNFGQTGDSDSVPDPQPLGQPPAAPSGLGTNTMATGSGAPMADNNEGADGVGNSSGNWHCDSTWMGDRVITTSTRTWALPTYNNHLYKQISSQSGASNDNHYFGYSTPWGYFDFNRFHCHFSPRDWQRLINNNWGFRPKRLNFKLFNIQVKEVTQNDGTTTIANNLTSTVQVFTDSEYQLPYVLGSAHQGCLPPFPADVFMVPQYGYLTLNNGSQAVGRSSFYCLEYFPSQMLRTGNNFTFSYTFEDVPFHSSYAHSQSLDRLMNPLIDQYLYYLSRTNTPSGTTTQSRLQFSQAGASDIQDQSRNWLPGPCYRQQRVSKTSADNNNSEYSWTGATKYHLNGRDSLVNPGPAMASHKDDEEKFFPQSGVLIFGKQGSEKTNVDIEKVMITDEEEIRTTNPVATEQYGSVSTNLQSGNTQAATADVNTQGVLPGMVGQDRDVYLQGPTWAKIPHTDGHFHPSPLMGGFGLKHPPPQILIKNTPVPANPSTTFSAAKFASFITQYSTGQVSVEIEWELQKENSKRWNPEIQYTSNYNKSVNVDFTVDTNGVYSEPRPIGTRYLTRNL

SEQ ID NO: 237 - DNA, 2208 bp, Artificial Sequence
  Description of Artificial Sequence: Synthetic polynucleotide
atggctgccgatggttatcttccagattggctcgaggacactctctctgaaggaataagacagtggtggaagctcaaacctggcccaccaccaccaaagcccgcagagcggcataaggacgacagcaggggtcttgtgcttcctgggtacaagtacctcggacccttcaacggactcgacaagggagagccggtcaacgaggcagacgccgcggccctcgagcacgacaaggcctacgaccggcagctcgacagcggagacaacccgtacctcaagtacaaccacgccgacgcagagtttcaggagcgccttaaagaagatacgtcttttgggggcaacctcggacgagcagtcttccaggcaaaaaagagggttctggaacctctgggcctggttgaggagcctgttaagacggctccgggaaaaaagaggccggtagagcactctcctgcagagccagattcctcctccggaactggaaagtcgggcaaccagcctgcaagaaagagattgaatttcggtcagactggagactcagactccgtacctgacccccagcctctcggacagccaccagcagccccctctggtctgggaactaatacgatggctacaggcagtggcgcaccaatggcagacaataacgagggcgccgacggagtgggtaattcctcgggaaattggcattgcgattccacatggatgggcgacagagtcatcaccaccagcacccgaacctgggccctgcccacctacaacaaccatctgtacaagcaaatatccagccagtctggagccagcaacgacaatcactactttggctacagcaccccctgggggtattttgacttcaacagattccactgccacttttcaccacgtgactggcaaagactcatcaacaacaactggggattccgacccaagagactcaacttcaagctctttaacattcaagtcaaagaggtcacgcagaatgacggtacgacgacgattgccaataaccttaccagcacggttcaggtgtttactgactcggagtaccagctcccgtacgtcctcggctcggcgcatcaaggatgcctcccgccgttcccagcagacgtcttcatggtgccacagtatggatacctcaccctgaacaacgggagtcaggcagtaggacgctcttcattttactgcctagggtactttccttctcagatgctgcgtaccggaaacaactttaccttcagctacacctttgaggacgttcctttccacagcagctacgctcacagccagagtttggaccgtctcatgaatcctctcatcgaccagtacctgtattacttgagcagaacaaacactccaagcggaaccaccacgcagtccaggcttcagttttctcaggccggagcgagtgacattcgggaccagtctaggaactggcttcctggaccctgttaccgtcagcagcgagtatcaaagacatctgcggataacaacaacagtgaatactcgtggactggagctaccaagtaccacctcaatggcagagactctctggtgaatccgggcccggccatggccagccacaaagacgatgaagaaaagttttttcctcagagcggggttcttatctttgggaagcaaggcccagagaaaacaaatgtggatattgaaaaggtcatgattacagacgaagaggaaatcaggaccaccaatcccgtggctacggagcagtatggttctgtatctaccaacctccagagcggcaacacacaagcagctaccgcagatgtcaacacacaaggcgttcttccaggcatggtctggcaagacagagacgtgtacctgcaggggcctatttgggcaaagattccacacacggacggacattttcacccctctcccctcatgggcggatttggacttaaacaccctcctccacagattctcatcaagaacaccccggtacctgcgaatccttcgaccaccttcagtgcggcaaagtttgcttccttcattacacagtactccacggggcaggtcagcgtggagatcgagtgggagctgcagaaggagaacagcaaacgctggaatcccgagatccagtacacttccaactacaacaagtctgttaatgtggactttactgtggacactaatggcgtgtattcagagcctcgccccattggcaccagatacctgactcgtaatctgtaa

SEQ ID NO: 238 - protein, 735 aa, Artificial Sequence
  Description of Artificial Sequence: Synthetic polypeptide
MAADGYLPDWLEDTLSEGIRQWWKLKPGPPPPKPAERHKDDSRGLVLPGYKYLGPFNGLDKGEPVNEADAAALEHDKAYDRQLDSGDNPYLKYNHADAEFQERLKEDTSFGGNLGRAVFQAKKRVLEPLGLVEEPVKTAPGKKRPVEHSPAEPDSSSGTGKSGNQPARKRLNFGQTGDSDSVPDPQPLGQPPAAPSGLGTNTMATGSGAPMADNNEGADGVGNSSGNWHCDSTWMGDRVITTSTRTWALPTYNNHLYKQISSQSGASNDNHYFGYSTPWGYFDFNRFHCHFSPRDWQRLINNNWGFRPKRLNFKLFNIQVKEVTQNDGTTTIANNLTSTVQVFTDSEYQLPYVLGSAHQGCLPPFPADVFMVPQYGYLTLNNGSQAVGRSSFYCLGYFPSQMLRTGNNFTFSYTFEDVPFHSSYAHSQSLDRLMNPLIDQYLYYLSRTNTPSGTTTQSRLQFSQAGASDIRDQSRNWLPGPCYRQQRVSKTSADNNNSEYSWTGATKYHLNGRDSLVNPGPAMASHKDDEEKFFPQSGVLIFGKQGPEKTNVDIEKVMITDEEEIRTTNPVATEQYGSVSTNLQSGNTQAATADVNTQGVLPGMVWQDRDVYLQGPIWAKIPHTDGHFHPSPLMGGFGLKHPPPQILIKNTPVPANPSTTFSAAKFASFITQYSTGQVSVEIEWELQKENSKRWNPEIQYTSNYNKSVNVDFTVDTNGVYSEPRPIGTRYLTRNL

SEQ ID NO: 239 - protein, 735 aa, Artificial Sequence
  Description of Artificial Sequence: Synthetic polypeptide
MAADGYLPDWLEDTLSEGIRQWWKLKPGPPPPKPAERHKDDSRGLVLPGYKYLGPFNGLDKGEPVNEADAAALEHDKAYDRQLDSGDNPYLKYNHADAEFQERLKEDTSFGGNLGRAVFQAKKRVLEPLGLVEEPVKTAPGKKRPVEHSPAEPDSSSGTGKSGNQPARKRLNFGQTGDSDSVPDPQPLGQPPAAPSGLGTNTMATGSGAPMADNNEGADGVGNSSGNWHCDSTWMGDRVITTSTRTWALPTYNNHLYKQISSQSGASNDNHYFGYSTPWGYFDFNRFHCHFSPRDWQRLINNNWGFRPKRLNFKLFNIQVKEVTQNDGTTTIANNLTSTVQVFTDSEYQLPYVLGSAHQGCLPPFPADVFMVPQYGYLTLNNGSQAVGRSSFYCLEYFPSQMLRTGNNFTFSYTFEDVPFHSSYAHSQSLDRLMNPLIDQYLYYLSRTNTPSGTTTQSRLQFSQAGASDIRDQSRNWLPGPCYRQQRVSKTSADNNNSEYSWTGATKYHLNGRDSLVNPGPAMASHKDDEEKFFPQSGVLIFGKQGPEKTNVDIEKVMITDEEEIRTTNPVATEQYGSVSTNLQSGNTQAATADVNTQGVLPGMVWQDRDVYLQGPIWAKIPHTDGHFHPSPLMGGFGLKHPPPQILIKNTPVPANPSTTFSAAKFASFITQYSTGQVSVEIEWELQKENSKRWNPEIQYTSNYNKSVNVDFTVDTNGVYSEPRPIGTRYLTRNL

SEQ ID NO: 240 - protein, 735 aa, Artificial Sequence; identical to SEQ ID NO: 239
  Description of Artificial Sequence: Synthetic polypeptide

SEQ ID NO: 241 - DNA, 2211 bp, Artificial Sequence
  Description of Artificial Sequence: Synthetic polynucleotide
atggctgccgatggttatcttccagattggctcgaggacactctctctgaaggaataagacagtggtggaagctcaaacctggcccaccaccaccaaagcccgcagagcggcataaggacgacagcaggggtcttgtgcttcctgggtacaagtacctcggacccttcaacggactcgacaagggggagccggtcaacgaggcagacgccgcggccctcgagcacgacaaggcctacgaccggcagctcgacagcggagacaacccgtacctcaagtacaaccacgccgacgcagagtttcaggagcgccttaaagaagatacgtcttttgggggcaacctcggacgagcagtcttccaggcgaaaaagagggttcttgaacctctgcggcctggtttgaggaaacctgttaagacggctccgggaaaaaagaggccggtagagcactctcctgtggagccagactcctcctcgggaaccggaaaagcgggccagcagcctgcaagaaaaagattaaattttggtcagactggagacgcagactccgtacctgacccccagcctctcggacagccaccagcagccccctctggtctgggatctactacaatggctacaggcagtggcgcaccaatggcagacaataacgagggtgccgatggagtgggtaattcctcaggaaattggcattgcgattcccaatggctggacgacagagtcatcgccaccagcacccgaacctgggccctgcccacatacaacaaccacctctacaagcaaatctccagccaatcaggagcctgcaacgacaaccactactttggctacagcaccccctgggggtattttgacttcaacagattccactgccacttttcaccacgtgactggcaaagactcatcaacagcaactggggattccggcccaaaagactcaacttcaagctctttaatattcaagtcaaagaggtcacgcagaatgacggtacgacgacgattgccaataaccttaccagcacggttcaggtgtttactgactcggagtaccagctcccgtacgtcccgggctcggcgcatcaaggatgcctcccgccgtttccagcggacgtcttcatggtcccacagtatggatacctcaccctgaacaacgggagtcaggcggtaggacgctcttccttttactgcctggagtactttccttctcagatgctgcgtactggaaacaactttcagttcagctacacttttgaagacgtgcctttccacagcagctacgctcactgccagagtctggatcggctgatgaatcctctgatcgaccagtacctgtattatctgaacaagacacaaacaaatagtggaactcttcagcagtctcggctactgtttagccaagctggaccaaccaacatgtctcttcaagctaaaaactggctgcctggaccttgctacagacagcagcgtctgtcaaaacaggcaaacgacaataacaactgcaactttccctggactgcagctacaaagtatcatctaaatggccgggactcgttggttaatccaggaccagctatggccagtcacaaggatgacgaagaaaagtttttccccatgcatggaaccctgatatttggtaaacaaggaacaaatgccaacgacgcggatttggaaaatgtcatgattacagatgaagaagaaatcaggcccaccaatcccgtggctacggagcagtacgggactgtgtcaaataatttgcaaaactcaaacactggtccaactacaggaactgtcaatcaccaaggagcgttacctggtatggtgtggcaggatcgagacgtgtacctgcagggacccatttgggccaagattcctcacaccgatggacactttcatccttctccactgatgggaggttttggactcaaacacccgcctcctcagatcatgatcaaaagcactcccgttccagccaatcctcccacaaacttcagttctgccaagtttgcttcttccatcacacagtattccacgggacaggtcagcgtggagatcgagtgggagctgcagaaggagaacagcaaacgctggaatcccgaaattcagtacacttccaactacaacaagtctgttaatgtggactttactgtggacactaatggtgtgtattcagagcctcgccccattggcaccagatacctgactcgtaatctgtaa

SEQ ID NO: 242 - protein, 736 aa, Artificial Sequence
  Description of Artificial Sequence: Synthetic polypeptide
MAADGYLPDWLEDTLSEGIRQWWKLKPGPPPPKPAERHKDDSRGLVLPGYKYLGPFNGLDKGEPVNEADAAALEHDKAYDRQLDSGDNPYLKYNHADAEFQERLKEDTSFGGNLGRAVFQAKKRVLEPLRPGLRKPVKTAPGKKRPVEHSPVEPDSSSGTGKAGQQPARKRLNFGQTGDADSVPDPQPLGQPPAAPSGLGSTTMATGSGAPMADNNEGADGVGNSSGNWHCDSQWLDDRVIATSTRTWALPTYNNHLYKQISSQSGACNDNHYFGYSTPWGYFDFNRFHCHFSPRDWQRLINSNWGFRPKRLNFKLFNIQVKEVTQNDGTTTIANNLTSTVQVFTDSEYQLPYVPGSAHQGCLPPFPADVFMVPQYGYLTLNNGSQAVGRSSFYCLEYFPSQMLRTGNNFQFSYTFEDVPFHSSYAHCQSLDRLMNPLIDQYLYYLNKTQTNSGTLQQSRLLFSQAGPTNMSLQAKNWLPGPCYRQQRLSKQANDNNNCNFPWTAATKYHLNGRDSLVNPGPAMASHKDDEEKFFPMHGTLIFGKQGTNANDADLENVMITDEEEIRPTNPVATEQYGTVSNNLQNSNTGPTTGTVNHQGALPGMVWQDRDVYLQGPIWAKIPHTDGHFHPSPLMGGFGLKHPPPQIMIKSTPVPANPPTNFSSAKFASSITQYSTGQVSVEIEWELQKENSKRWNPEIQYTSNYNKSVNVDFTVDTNGVYSEPRPIGTRYLTRNL

SEQ ID NO: 243 - DNA, 2208 bp, Artificial Sequence
  Description of Artificial Sequence: Synthetic polynucleotide
atggctgccgatggttatcttccagattggctcgaggacactctctctgaaggaataagacagtggtggaagctcaaacctggcccaccaccaccaaagcccgcagagcggcataaggacgacagcaggggtcttgtgcttcctgggtacaagtacctcggacccttcaacggactcgacaagggagagccggtcaacgaggcagacgccgcggccctcgagcacgacaaggcctacgaccggcagctcgacagcggagacaacccgtacctcaagtacaaccacgccgacgcggagtttcaggagcgccttaaagaggatacgtcttttgggggcaacctcggacgagcagtcttccaggcaaaaaagagggttctggaacctctgggcctggttgaggagcctgttaagacggctccgggaaaaaagaggccggtagagcactctcctgcagagccagattcctcctccggaactggaaagtcgggcaaccagcctgcaagaaagagattgaatttcggtcagactggagactcagactccgtacctgacccccagcctctcggacagccaccagcagccccctctggtctgggaactaatacgatggctacaggcagtggcgcaccaatggcagacaataacgagggcgccgacggagtgggtaattcctcgggaaattggcattgcgattccacatggatgggcgacagagtcatcaccaccagcacccgaacctgggccctgcccacctacaacaaccatctgtacaagcaaatatccagccagtctggagccagcaacgacaatcactactttggctacagcaccccctgggggtattttgacttcaacagattccactgccacttttcaccacgtgactggcaaagactcatcaacaacaactggggattccgacccaagagactcaacttcaagctctttaacattcaagtcaaagaggtcacgcagaatgacggtacgacgacgattgccaataaccttaccagcacggttcaggtgtttactgactcggagtaccagctcccgtacgtcctcggctcggcgcatcaaggatgcctcccgccgttcccagcagacgtcttcatggtgccacagtatggatacctcaccctgaacaacgggagtcaggcagtaggacgctcttcattttactgcctagagtactttccttctcagatgctgcgtaccggaaacagctttaccttcagctacacctttgaggacgttcctttccacagcagctacgctcacagccagagtttggaccgtctcatgaatcctctcatcgaccagtacctgtattacttgagcagaacaaacactccaagcggaaccaccacgcagtccaggcttcagttttctcaggccggagcgagtgacattcgggaccagtctaggaactggcttcctggaccctgttaccgtcagcagcgagtatcaaagacatctgcggataacaacaacagtgaatactcgtggactggagctaccaagtaccacctcaatggcagagactctctggtgaatccgggcccggccatggccagccacaaagacgatgaagaaaagttctttcctcagagcggggttcttatctttgggaagcaaggctcagagaaaacaaatgtggatattgaaaaggtcatgattacagacgaagaggaaatcaggaccaccaatcccgtggctacggagcagtatggttctgtatctaccaacctccagagcggcaacacacaagcagctaccgcagatgtcaacacacaaggcgttcttccaggcatggtctggcaagacagagacgtgtacctgcaggggcctatttgggcaaagattccacacacggacggacattttcacccctctcccctcatgggcggatttggacttaaacaccctcctccacagattctcatcaagaacaccccggtacctgcgaatccttcgaccaccttcagtgcggcaaagtttgcttccttcattacacagtactccacggggcaggtcagcgtggagatcgagtgggagctgcagaaggagaacagcaaacgctggaatcccgagatccagtacacttccaactacaacaagtctgttaatgtggactttactgtggacactaatggcgtgtattcagagcctcgccccattggcaccagatacctgactcgtaatctgtaa

SEQ ID NO: 244 - protein, 735 aa, Artificial Sequence
  Description of Artificial Sequence: Synthetic polypeptide
MAADGYLPDWLEDTLSEGIRQWWKLKPGPPPPKPAERHKDDSRGLVLPGYKYLGPFNGLDKGEPVNEADAAALEHDKAYDRQLDSGDNPYLKYNHADAEFQERLKEDTSFGGNLGRAVFQAKKRVLEPLGLVEEPVKTAPGKKRPVEHSPAEPDSSSGTGKSGNQPARKRLNFGQTGDSDSVPDPQPLGQPPAAPSGLGTNTMATGSGAPMADNNEGADGVGNSSGNWHCDSTWMGDRVITTSTRTWALPTYNNHLYKQISSQSGASNDNHYFGYSTPWGYFDFNRFHCHFSPRDWQRLINNNWGFRPKRLNFKLFNIQVKEVTQNDGTTTIANNLTSTVQVFTDSEYQLPYVLGSAHQGCLPPFPADVFMVPQYGYLTLNNGSQAVGRSSFYCLEYFPSQMLRTGNSFTFSYTFEDVPFHSSYAHSQSLDRLMNPLIDQYLYYLSRTNTPSGTTTQSRLQFSQAGASDIRDQSRNWLPGPCYRQQRVSKTSADNNNSEYSWTGATKYHLNGRDSLVNPGPAMASHKDDEEKFFPQSGVLIFGKQGSEKTNVDIEKVMITDEEEIRTTNPVATEQYGSVSTNLQSGNTQAATADVNTQGVLPGMVWQDRDVYLQGPIWAKIPHTDGHFHPSPLMGGFGLKHPPPQILIKNTPVPANPSTTFSAAKFASFITQYSTGQVSVEIEWELQKENSKRWNPEIQYTSNYNKSVNVDFTVDTNGVYSEPRPIGTRYLTRNL

SEQ ID NO: 245 - DNA, 2211 bp, Artificial Sequence; identical to SEQ ID NO: 135
  Description of Artificial Sequence: Synthetic polynucleotide

SEQ ID NO: 246 - protein, 736 aa, Artificial Sequence
  Description of Artificial Sequence: Synthetic polypeptide
MAADGYLPDWLEDTLSEGIRQWWKLKPGPPPPKPAERHKDDSRGLVLPGYKYLGPGNGLDKGEPVNAADAAALEHDKAYDQQLKAGDNPYLKYNHADAEFQERLKEDTSFGGNLGRAVFQAKKRLLEPLGLVEEAAKTAPGKKRPVEQSPQEPDSSAGIGKSGSQPAKKKLNFGQTGDTESVPDPQPIGEPPAAPSGVGSLTMASGGGAPVADNNEGADGVGSSSGNWHCDSQWLGDRVITTSTRTWALPTYNNHLYKQISNSTSGGSSNDNAYFGYSTPWGYFDFNRFHCHFSPRDWQRLINNNWGFRPKRLNFKLFNIQVKEVTDNNGVKTIANNLTSTVQVFTDSDYQLPYVLGSAHEGCLPPFPADVFMIPQYGYLTLNDGGQAVGRSSFYCLEYFPSQMLRTGNNFQFSYEFENVPFHSSYAHSQSLDRLMNPLIDQYLYYLSKTINGSGQNQQTLKFSVAGPSNMAVQGRNYIPGPSYRQQRVSTTVTQNNNSEFAWPGASSWALNGRNSLMNPGPAMASHKEGEDRFFPLSGSLIFGKQGTGRDNVDADKVMITNEEEIKTTNPVATESYGQVATNHQSAQAQAQTGWVQNQGILPGMVWQDRDVYLQGPIWAKIPHTDGNFHPSPLMGGFGMKHPPPQILIKNTPVPADPPTAFNKDKLNSFITQYSTGQVSVEIEWELQKENSKRWNPEIQYTSNYYKSNNVEFAVSTEGVYSEPRPIGTRYLTRNL

SEQ ID NO: 247 - DNA, 2211 bp, Artificial Sequence
  Description of Artificial Sequence: Synthetic polynucleotide
atggctgccgatggttatcttccagattggctcgaggacactctctctgaaggaataagacagtggtggaagctcaaacctggcccaccaccaccaaagcccgcagagcggcataaggacgacagcaggggtcttgtgcttcctgggtacaagtacctcggacccggcaacggactcgacaagggggagccggtcaacgcagcagacgcggcggccctcgagcacgacaaggcctacgaccagcagctcaaggccggagacaacccgtacctcaagtacaaccacgccgacgccgagttccaggagcggctcaaagaagatacgtcttttgggggcaacctcgggcgagcagtcttccaggccaaaaagaggcttcttgaacctcttggtctggttgaggaagcggctaagacggctcctggaaagaagaggcctgtagagcagtctcctcaggaaccggactcctccgcgggtattggcaaatcgggttcacagcccgctaaaaagaaactcaatttcggtcagactggcgacacagagtcagtccccgaccctcaaccaatcggagaacctcccgcagccccctcaggtgtgggatctcttacaatggcttcaggtggtggcgcaccagtggcagacaataacgaaggtgccgatggagtgggtagttcctcgggaaattggcattgcgattcccaatggctgggggacagagtcatcaccaccagcacccgaacctgggccctgcccacctacaacaatcacctctacaagcaaatctccaacagcacatctggaggatcttcaaatgacaacgcctacttcggctacagcaccccctgggggtattttgacttcaacagattccactgccacttctcaccacgtgactggcagcgactcatcaacaacaactggggattccggcctaagcgactcaacttcaagctcttcaacattcaggtcaaagaggttacggacaacaatggagtcaagaccatcgccaataaccttaccagcacggtccaggtcttcacggactcagactatcagctcccgtacgtgctcgggtcggctcacgagggctgcctcccgccgttcccagcggacgttttcatgattcctcagtacgggtatctgacgcttaatgatgggagccaggccgtgggtcgttcgtccttttactgcctggaatatttcccgtcgcaaatgctaagaacgggtaacaacttccagttcagctacgagtttgagaacgtacctttccatagcagctacgctcacagccaaagcctggaccgactaatgaatccactcatcgaccaatacttgtactatctctcaaagactattaacggttctggacagaatcaacaaacgctaaaattcagcgtggccggacccagcaacatggctgtccagggaagaaactacatacctggacccagctaccgacaacaacgtgtctcaaccactgtgactcaaaacaacaacagcgaatttgcttggcctggagcttcttcttgggctctcaatggacgtaatagcttgatgaatcctggacctgctatggccagccacaaagaaggagaggaccgtttctttcctttgtctggatctttaatttttggcaaacaaggaactggaagagacaacgtggatgcggacaaagtcatgataaccaacgaagaagaaattaaaactactaacccggtagcaacggagtcctatggacaagtggccacaaaccaccagagtgcccaagcacaggcgcagaccggctgggttcaaaaccaaggaatacttccgggtatggtttggcaggacagagatgtgtacctgcaaggacccatttgggccaaaattcctcacacggacggcaactttcacccttctccgctaatgggagggtttggaatgaagcacccgcctcctcagatcctcatcaaaaacacacctgtacctgcggatcctccaacggctttcaataaggacaagctgaactctttcatcacccagtattctactggccaagtcagcgtggagattgagtgggagctgcagaaggaaaacagcaagcgctggaacccggagatccagtacacttccaactattacaagtctaataatgttgaatttgctgttaatactgaaggtgtatatagtgaaccccgccccattggcaccagatacctgactcgtaatctgtaa

SEQ ID NO: 248 - protein, 736 aa, Artificial Sequence
  Description of Artificial Sequence: Synthetic polypeptide
MAADGYLPDWLEDTLSEGIRQWWKLKPGPPPPKPAERHKDDSRGLVLPGYKYLGPGNGLDKGEPVNAADAAALEHDKAYDQQLKAGDNPYLKYNHADAEFQERLKEDTSFGGNLGRAVFQAKKRLLEPLGLVEEAAKTAPGKKRPVEQSPQEPDSSAGIGKSGSQPAKKKLNFGQTGDTESVPDPQPIGEPPAAPSGVGSLTMASGGGAPVADNNEGADGVGSSSGNWHCDSQWLGDRVITTSTRTWALPTYNNHLYKQISNSTSGGSSNDNAYFGYSTPWGYFDFNRFHCHFSPRDWQRLINNNWGFRPKRLNFKLFNIQVKEVTDNNGVKTIANNLTSTVQVFTDSDYQLPYVLGSAHEGCLPPFPADVFMIPQYGYLTLNDGSQAVGRSSFYCLEYFPSQMLRTGNNFQFSYEFENVPFHSSYAHSQSLDRLMNPLIDQYLYYLSKTINGSGQNQQTLKFSVAGPSNMAVQGRNYIPGPSYRQQRVSTTVTQNNNSEFAWPGASSWALNGRNSLMNPGPAMASHKEGEDRFFPLSGSLIFGKQGTGRDNVDADKVMITNEEEIKTTNPVATESYGQVATNHQSAQAQAQTGWVQNQGILPGMVWQDRDVYLQGPIWAKIPHTDGNFHPSPLMGGFGMKHPPPQILIKNTPVPADPPTAFNKDKLNSFITQYSTGQVSVEIEWELQKENSKRWNPEIQYTSNYYKSNNVEFAVNTEGVYSEPRPIGTRYLTRNL

SEQ ID NO: 249 - DNA, 2208 bp, Artificial Sequence
  Description of Artificial Sequence: Synthetic polynucleotide
atggctgccgatggttatcttccagattggctcgaggacactctctctgaaggaataagacagcggtggaagctcaaacctggcccaccaccaccagagcccgcagagcggcataaggacgacagcaggggtcttgtgcttcctgggtacaagtacctcggacccttcaacggactcgacaagggagagccggtcaacgaggcagacgccgcggccctcgagcacgacaaagcctacgaccggcagctcgacagcggagacaacccgtacctcaagtacaaccacgccgacgcggagtttcaggagcgccttaaagaagatacgtcttttgggggcaacctcggacgagcagtcttccaggcgaaaaagagggtacttgaacctctgggcctggttgaggaacctgttaagacggctccgggaaaaaagaggccggtagagcactctcctgtggagccagactcctcctcgggaaccggaaaggcgggccagcagcctgcaagaaaaagattgaattttggtcagactggagacgcagactcagtacctgacccccagcctctcggacagccaccagcagccccctctggtctgggaactaatacgatggctacaggcagtggcgcaccaatggcagacaataacgagggcgccgacggagtgggtaattcctcgggaaattggcattgcgattccacatggatgggcgacagagtcatcaccaccagcacccgaacctgggccctgcccacctacaacaaccacctctacaaacaaatttccagccaatcaggagcctcgaacgacaatcactactttggctacagcaccccttgggggtattttgacttcaacagattccactgccacttttcaccacgtgactggcaaagactcatcaacaacaactggggattccgacccaagagactcaacttcaagctctttaacattcaagtcaaagaggtcacgcagaatgacggtacgacgacgattgccaataaccttaccggcacggttcaggtgtttactgactcggagtaccagctcccgtacgtcctcggctcggcgcatcaaggatgcctcccgccgttcccagcagacgtcttcatggtgccacagtatggatacctcaccctgaacaacgggagtcaggcagtaggacgctcttcattttactgcctggagtactttccttctcagatgctgcgtaccggaaacaactttaccttcagctacacttttgaggacgttcctttccacagcagctacgctcacagccagagtctgggccgtctcatgaatcctctcatcgaccagtacctgtattacttgagcagaacaaacactccaagtggaaccaccacgcagtcaaggcttcagttttctcaggccggagcgagtgacattcgggaccagtctaggaactggcttcctggaccctgttaccgccagcagcgagtatcaaagacatctgcggataacaacaacagtgaatactcgtggactggagctaccaagtaccacctcaatggcagagactctctggtgaatccgggcccggccatggcaagccacaaggacgatgaagaaaagttttttcctcagagcggggttctcatctttgggaagcaaggctcagagaaaacaaatgtggacattgaaaaggtcatgattacagacgaagaggaaatcaggacaaccaatcccgtggctacggagcagtatggttctgtatctaccaacctccagagaggcaacagacaagcagctaccgcagatgtcaacacacaaggcgttcttccaggcatggtctggcaggacagagatgtgtaccttcaggggcccatctgggcaaagattccacacacggacggacattttcacccctctcccctcatgggtggattcggacttaaacaccctcctccacagattctcatcaagaacaccccggtacctgcgaatccttcgaccaccttcagtgcggcaaagtttgcttccttcatcacacagtactccacgggacaggtcagcgtggagatcgagtgggagctgcagaaggaaaacagcaaacgctggaatcccgaaattcagtacacttccaactacaacaagtctgttaatgtggactttactgtggacactaatggcgtgtattcagagcctcgccccattggcaccagatacctgactcgtaatctgtaa

SEQ ID NO: 250 - protein, 735 aa, Artificial Sequence
  Description of Artificial Sequence: Synthetic polypeptide
MAADGYLPDWLEDTLSEGIRQRWKLKPGPPPPEPAERHKDDSRGLVLPGYKYLGPFNGLDKGEPVNEADAAALEHDKAYDRQLDSGDNPYLKYNHADAEFQERLKEDTSFGGNLGRAVFQAKKRVLEPLGLVEEPVKTAPGKKRPVEHSPVEPDSSSGTGKAGQQPARKRLNFGQTGDADSVPDPQPLGQPPAAPSGLGTNTMATGSGAPMADNNEGADGVGNSSGNWHCDSTWMGDRVITTSTRTWALPTYNNHLYKQISSQSGASNDNHYFGYSTPWGYFDFNRFHCHFSPRDWQRLINNNWGFRPKRLNFKLFNIQVKEVTQNDGTTTIANNLTGTVQVFTDSEYQLPYVLGSAHQGCLPPFPADVFMVPQYGYLTLNNGSQAVGRSSFYCLEYFPSQMLRTGNNFTFSYTFEDVPFHSSYAHSQSLGRLMNPLIDQYLYYLSRTNTPSGTTTQSRLQFSQAGASDIRDQSRNWLPGPCYRQQRVSKTSADNNNSEYSWTGATKYHLNGRDSLVNPGPAMASHKDDEEKFFPQSGVLIFGKQGSEKTNVDIEKVMITDEEEIRTTNPVATEQYGSVSTNLQRGNRQAATADVNTQGVLPGMVWQDRDVYLQGPIWAKIPHTDGHFHPSPLMGGFGLKHPPPQILIKNTPVPANPSTTFSAAKFASFITQYSTGQVSVEIEWELQKENSKRWNPEIQYTSNYNKSVNVDFTVDTNGVYSEPRPIGTRYLTRNL

SEQ ID NO: 251 - DNA, 2208 bp, Artificial Sequence
  Description of Artificial Sequence: Synthetic polynucleotide
atggctgccgatggttatcttccagattggctcgaggacactctctctgaaggaataagacagcggtggaagctcaaacctggcccaccaccaccagagcccgcagagcggcataaggacgacagcaggggtcttgtgcttcctgggtacaagtacctcggacccttcaacggactcgacaagggagagccggtcaacgaggcagacgccgcggccctcgagcacgacaaagcctacgaccggcagctcgacagcggagacaacccgtacctcaagtacaaccacgccgacgcggagtttcaggagcgccttaaagaagatacgtcctttgggggcaacctcggacgagcagtcttccaggcgaaaaagagggtacttgaacctctgggcctggttgaggaacctgttaagacggctccgggaaaaaagaggccggtagagcactctcctgtggagccagactcctcctcgggaaccggaaaggcgggccagcagcctgcaagaaaaagattgaattttggtcagactggagacgcagactcagtacctgacccccagcctctcggacagccaccagcagccccctctggtctgggaactaatacgatggctacaggcagtggcgcaccaatggcagacaataacgagggcgccgacggagtgggtaattcctcgggaaattggcattgcgattccacatggatgggcgacagagtcatcaccaccagcacccgaacctgggccctgcccacctacaacaaccacctctacaaacaaatttccagccaatcaggagcctcgaacgacaatcactactttggctacagcaccccttgggggtattttgacttcaacagattccactgccacttttcaccacgtgactggcaaagactcatcaacaacaactggggattccgacccaagagactcaacttcaagctctttaacattcaagtcaaagaggtcacgcagaatgacggtacgacgacgattgccaataaccttaccagcacggttcaggtgtttactgactcggagtaccagctcccgtacgtcctcggctcggcgcatcaaggatgcctcccgccgttcccagcagacgtcttcatggtgccacagtatggatacctcaccctgaacaacgagagtcaggcagtaggacgctcttcattttactgcctggagtactttccttctcagatgctgcgtaccggaaacaactttaccttcagctacacttttgaggacgttcctttccacagcagctacgctcacagccagagtctgggccgtctcatgaatcctctcatcgaccagtacctgtattacttgagcagaacaaacactccaagtggaaccaccacgcagtcaaggcttcagttttctcaggccggagcgagtgacattcgggaccagtctaggaactggcttcctggaccctgttaccgccagcagcgagtatcaaagacatctgcggataacaacaacagtgaatactcgtggactggagctaccaagtaccacctcaatggcagagactctctggtgaatccgggcccggccatggcaagccacaaggacgatgaagaaaagttttttcctcagagcggggttctcatctttgggaagcaaggctcagagaaaacaaatgtggacattgaaaaggtcatgattacagacgaagaggaaatcaggacaaccaatcccgtggctacggagcagtatggttctgtatctaccaacctccagagaggcaacagacaagcagctaccgcagatgtcaacacacaaggcgttcttccaggcatggtctggcaggacagagatgtgtaccttcaggggcccatctgggcaaagattccacacacggacggacattttcacccctctcccctcatgggtggattcggacttaaacaccctcctccacagattctcatcaagaacaccccggtacctgcgaatccttcgaccaccttcagtgcggcaaagtttgcttccttcatcacacagtactccacgggacaggtcagcgtggagatcgagtgggagctgcagaaggaaaacagcaaacgctggaatcccgaaattcagtacacttccaactacaacaagtctgttaatgtggactttactgtggacactaatggcgtgtattcagagcctcgccccattggcaccagatacctgactcgtaatctgtaa

SEQ ID NO: 252 - protein, 735 aa, Artificial Sequence
  Description of Artificial Sequence: Synthetic polypeptide
MAADGYLPDWLEDTLSEGIRQRWKLKPGPPPPEPAERHKDDSRGLVLPGYKYLGPFNGLDKGEPVNEADAAALEHDKAYDRQLDSGDNPYLKYNHADAEFQERLKEDTSFGGNLGRAVFQAKKRVLEPLGLVEEPVKTAPGKKRPVEHSPVEPDSSSGTGKAGQQPARKRLNFGQTGDADSVPDPQPLGQPPAAPSGLGTNTMATGSGAPMADNNEGADGVGNSSGNWHCDSTWMGDRVITTSTRTWALPTYNNHLYKQISSQSGASNDNHYFGYSTPWGYFDFNRFHCHFSPRDWQRLINNNWGFRPKRLNFKLFNIQVKEVTQNDGTTTIANNLTSTVQVFTDSEYQLPYVLGSAHQGCLPPFPADVFMVPQYGYLTLNNESQAVGRSSFYCLEYFPSQMLRTGNNFTFSYTFEDVPFHSSYAHSQSLGRLMNPLIDQYLYYLSRTNTPSGTTTQSRLQFSQAGASDIRDQSRNWLPGPCYRQQRVSKTSADNNNSEYSWTGATKYHLNGRDSLVNPGPAMASHKDDEEKFFPQSGVLIFGKQGSEKTNVDIEKVMITDEEEIRTTNPVATEQYGSVSTNLQRGNRQAATADVNTQGVLPGMVWQDRDVYLQGPIWAKIPHTDGHFHPSPLMGGFGLKHPPPQILIKNTPVPANPSTTFSAAKFASFITQYSTGQVSVEIEWELQKENSKRWNPEIQYTSNYNKSVNVDFTVDTNGVYSEPRPIGTRYLTRNL

SEQ ID NO: 253 - DNA, 2208 bp, Artificial Sequence
  Description of Artificial Sequence: Synthetic polynucleotide
atggctgccgatggttatcttccagattggctcgaggacactctctctgaaggaataagacagcggtggaagctcaaacctggcccaccaccaccagagcccgcagagcggcataaggacgacagcaggggtcttgtgcttcctgggtacaagtacctcggacccttcaacggactcgacaagggagagccggtcaacgaggcagacgccgcggccctcgagcacgacaaagcctacgaccggcagctcgacagcggagacaacccgtacctcaagtacaaccacgccgacgcggagtttcaggagcgccttaaagaagatacgtcttttgggggcaacctcggacgagcagtcttccaggcgaaaaagagggtacttgaacctctgggcctggttgaggaacctgttaagacggctccgggaaaaaagaggccggtagagcactctcctgtggagccagactcctcctcgggaaccggaaaggcgggccagcagcctgcaagaaaaagattgaattttggtcagactggagacgcagactcagtacctgacccccagcctctcggacagccaccagcagccccctctggtctgggaactaatacgatggctacaggcagtggcgcaccaatggcagacaataacgagggcgccgacggagtgggtaattcctcgggaaattggcattgcgattccacatggatgggcgacagagtcatcaccaccagcacccgaacctgggccctgcccacctacaacaaccacctctacaaacaaatttccagccaatcaggagcctcgaacgacaatcactactttggctacagcaccccttgggggtattttgacttcaacagattccactgccacttttcaccacgtgactggcaaagactcatcaacaacaactggggattccgacccaagagactcaacttcaagctctttaacattcaagtcaaagaggtcacgcagaatgacggtacgacgacgattgccaataaccttaccagcacggttcaggtgtttactgactcggagtaccagctcccgtacgtcctcggctcggcgcatcaaggatgcctcccgccgttcccagcagacgtcttcatggtaccacagtatggatacctcaccctgaacaacgggagtcaggcagtaggacgctcttcattttactgcctggagtactttccttctcagatgctgcgtaccggaaacaactttaccttcagctacacttttgaggacgttcctttccacagcagctacgctcacagccagagtctgggccgtctcatgaatcctctcatcgaccagtacctgtattacttgagcagaacaaacactccaagtggaaccaccacgcagtcaaggcttcagttttctcaggccggagcgagtgacattcgggaccagtctaggaactggcttcctggaccctgttaccgccagcagcgagtatcaaagacatctgcggataacaacaacagtgaatactcgtggactggagctaccaagtaccacctcaatggcagagactctctggtgaatccgggcccggccatggcaagccacaaggacgatgaagaaaagttttttcctcagagcggggttctcatctttgggaagcaaggctcagagaaaacaaatgtggacattgaaaaggtcatgattacagacgaagaggaaatcaggacaaccaatcccgtggctacggagcagtatggttctgtatctaccaacctccagagaggcaacagacaagcagctaccgcagatgtcaacacacaaggcgttcttccaggcatggtctggcaggacagagatgtgtaccttcaggggcccatctgggcaaagattccacacacggacggacattttcacccctctcccctcatgggtggattcggacttaaacaccctcctccacagattctcatcaagaacaccccggtacctgcgaatccttcgaccaccttcagtgcggcaaagtttgcttccttcatcacacagtactccacgggacaggtcagcgtggagatcgagtgggagctgcagaaggaaaacagcaaacgctggaatcccgaaattcagtacacttccaactacaacaagtctgttaatgtggactttactgtggacactaatggcgtgtattcagagcctcgccccattggcaccagatacctgactcgtaatctgtaa

SEQ ID NO: 254 - protein, 735 aa, Artificial Sequence
  Description of Artificial Sequence: Synthetic polypeptide
MAADGYLPDWLEDTLSEGIRQRWKLKPGPPPPEPAERHKDDSRGLVLPGYKYLGPFNGLDKGEPVNEADAAALEHDKAYDRQLDSGDNPYLKYNHADAEFQERLKEDTSFGGNLGRAVFQAKKRVLEPLGLVEEPVKTAPGKKRPVEHSPVEPDSSSGTGKAGQQPARKRLNFGQTGDADSVPDPQPLGQPPAAPSGLGTNTMATGSGAPMADNNEGADGVGNSSGNWHCDSTWMGDRVITTSTRTWALPTYNNHLYKQISSQSGASNDNHYFGYSTPWGYFDFNRFHCHFSPRDWQRLINNNWGFRPKRLNFKLFNIQVKEVTQNDGTTTIANNLTSTVQVFTDSEYQLPYVLGSAHQGCLPPFPADVFMVPQYGYLTLNNGSQAVGRSSFYCLEYFPSQMLRTGNNFTFSYTFEDVPFHSSYAHSQSLGRLMNPLIDQYLYYLSRTNTPSGTTTQSRLQFSQAGASDIRDQSRNWLPGPCYRQQRVSKTSADNNNSEYSWTGATKYHLNGRDSLVNPGPAMASHKDDEEKFFPQSGVLIFGKQGSEKTNVDIEKVMITDEEEIRTTNPVATEQYGSVSTNLQRGNRQAATADVNTQGVLPGMVWQDRDVYLQGPIWAKIPHTDGHFHPSPLMGGFGLKHPPPQILIKNTPVPANPSTTFSAAKFASFITQYSTGQVSVEIEWELQKENSKRWNPEIQYTSNYNKSVNVDFTVDTNGVYSEPRPIGTRYLTRNL

SEQ ID NO: 255 - DNA, 2208 bp, Artificial Sequence
  Description of Artificial Sequence: Synthetic polynucleotide
atggctgccgatggttatcttccagattggctcgaggacactctctctgaaggaataagacagcggtggaagctcaaacctggcccaccaccaccagagcccgcagagcggcataaggacgacagcaggggtcttgtgcttcctgggtacaagtacctcggacccttcaacggactcgacaagggagagccggtcaacgaggcagacgccgcggccctcgagcacgacaaagcctacgaccggcagctcgacagcggagacaacccgtacctcaagtacaaccacgccgacgcggagtttcaggagcgccttaaagaagatacgtcttttgggggcaacctcggacgagcagtcttccaggcgaaaaagagggtactcgaacctctgggcctggttgaggaacctgttaagacggctccgggaaaaaagaggccggtagagcactctcctgtggagccagactcctcctcgggaaccggaaaggcgggccagcagcctgcaagaaaaagattgaattttggtcagactggagacgcagactcagtacctgacccccagcctctcggacagccaccagcagccccctctggtctgggaactaatacgatggctacaggcagtggcgcaccaatggcagacaataacgagggcgccgacggagtgggtaattcctcgggaaattggcattgcgattccacatggatgggcgacagagtcatcaccaccagcacccgaacctgggccctgcccacctacaacaaccacctctacaaacaaatttccagccaatcaggagcctcgaacgacaatcactactttggctacagcaccccttgggggtattttgacttcaacagattccactgccacttttcaccacgtgactggcaaagactcatcaacaacaactggggattccgacccaagagactcaacttcaagctctttaacattcaagtcaaagaggtcacgcagaatgacggtacgacgacgattgccaataaccttaccagcacggttcaggtgtttactgactcggagtaccagctcccgtacgtcctcggctcggcgcatcaaggatgcctcccgccgttcccagcagacgtcttcatggtgccacagtatggatacctcaccctgaacaacgggagtcaggcagcaggacgctcttcattttactgcctggagtactttccttctcagatgctgcgtaccggaaacaactttaccttcagctacacttttgaggacgttcctttccacagcagctacgctcacagccagagtctgggccgtctcatgaatcctctcatcgaccagtacctgtattacttgagcagaacaaacactccaagtggaaccaccacgcagtcaaggcttcagttttctcaggccggagcgagtgacattcgggaccagtctaggaactggcttcctggaccctgttaccgccagcagcgagtatcaaagacatctgcggataacaacaacagtgaatactcgtggactggagctaccaagtaccacctcaatggcagagactctctggtgaatccgggcccggccatggcaagccacaaggacgatgaagaaaagttttttcctcagagcggggttctcatctttgggaagcaaggctcagagaaaacaaatgtggacattgaaaaggtcatgattacagacgaagaggaaatcaggacaaccaatcccgtggctacggagcagtatggttctgtatctaccaacctccagagaggcaacagacaagcagctaccgcagatgtcaacacacaaggcgttcttccaggcatggtctggcaggacagagatgtgtaccttcaggggcccatctgggcaaagattccacacacggacggacattttcacccctctcccctcatgggtggattcggacttaaacaccctcctccacagattctcatcaagaacaccccggtacctgcgaatccttcgaccaccttcagtgcggcaaagtttgcttccttcatcacacagtactccacgggacaggtcagcgtggagatcgagtgggagctgcagaaggaaaacagcaaacgctggaatcccgaaattcagtacacttccaactacaacaagtccgttaatgtggactttactgtggacactaatggcgtgtattcagagcctcgccccattggcaccagatacctgactcgtaatctgtaa

SEQ ID NO: 256 - protein, 735 aa, Artificial Sequence
  Description of Artificial Sequence: Synthetic polypeptide
MAADGYLPDWLEDTLSEGIRQRWKLKPGPPPPEPAERHKDDSRGLVLPGYKYLGPFNGLDKGEPVNEADAAALEHDKAYDRQLDSGDNPYLKYNHADAEFQERLKEDTSFGGNLGRAVFQAKKRVLEPLGLVEEPVKTAPGKKRPVEHSPVEPDSSSGTGKAGQQPARKRLNFGQTGDADSVPDPQPLGQPPAAPSGLGTNTMATGSGAPMADNNEGADGVGNSSGNWHCDSTWMGDRVITTSTRTWALPTYNNHLYKQISSQSGASNDNHYFGYSTPWGYFDFNRFHCHFSPRDWQRLINNNWGFRPKRLNFKLFNIQVKEVTQNDGTTTIANNLTSTVQVFTDSEYQLPYVLGSAHQGCLPPFPADVFMVPQYGYLTLNNGSQAAGRSSFYCLEYFPSQMLRTGNNFTFSYTFEDVPFHSSYAHSQSLGRLMNPLIDQYLYYLSRTNTPSGTTTQSRLQFSQAGASDIRDQSRNWLPGPCYRQQRVSKTSADNNNSEYSWTGATKYHLNGRDSLVNPGPAMASHKDDEEKFFPQSGVLIFGKQGSEKTNVDIEKVMITDEEEIRTTNPVATEQYGSVSTNLQRGNRQAATADVNTQGVLPGMVWQDRDVYLQGPIWAKIPHTDGHFHPSPLMGGFGLKHPPPQILIKNTPVPANPSTTFSAAKFASFITQYSTGQVSVEIEWELQKENSKRWNPEIQYTSNYNKSVNVDFTVDTNGVYSEPRPIGTRYLTRNL

SEQ ID NO: 257 - protein, 738 aa, Artificial Sequence; identical to SEQ ID NO: 99
  Description of Artificial Sequence: Synthetic polypeptide

SEQ ID NO: 258 - DNA, 2217 bp, Artificial Sequence
  Description of Artificial Sequence: Synthetic polynucleotide
atggctgctgacggttatcttccagattggctcgaggacaacctctctgagggcattcgcgagtggtgggacctgaaacctggagcccccaagcccaaggccaaccagcagaagcaggacgacggccggggtctggtgcttcctggctacaagtacctcggacccttcaacggactcgacaagggggagcccgtcaacgcggcggacgcagcggccctcgagcacgacaaggcctacgaccagcagctcaaagcgggtgacaatccgtacctgcggtataaccacgccgacgccgagtttcaggagcgtctgcaagaagatacgtcttttgggggcaacctcgggcgagcagtcttccaggccaagaagcgggttctcgaacctctcggtctggttgaggaagctgctaagacggctcctggaaagaagagaccggtagaaccgtcacctcagcgttcccccgactcctccacgggcatcggcaagaaaggccagcagcccgctaaaaagagactgaactttggtcagactggcgactcagagtcagtccccgaccctcaaccaatcggagaaccaccagcaggcccctctggtctgggatctggtacaatggctgcaggcggtggcgctccaatggcagacaataacgaaggcgccgacggagtgggtagttcctcaggaaattggcattgcgattccacatggctgggcgacagagtcatcaccaccagcacccgaacctgggccctgcccacctacaacaaccacctctacaagcaaatatccaatgggacatcgggaggaagcaccaacgacaacacctacttcggctacagcaccccctgggggtattttgacttcaacagattccactgccacttctcaccacgtgactggcagcgactcatcaacaacaactggggattccggccaaaaagactcagcttcaagctcttcaacatccaggtcaaggaggtcacgcagaatgaaggcaccaagaccatcgccaataaccttaccagcacgattcaggtatttacggactcggaataccagctgccgtacgtcctcggctccgcgcaccagggctgcctgcctccgttcccggcggacgtcttcatgattccccagtacggctaccttacactgaacaatggaagtcaagccgtaggccgttcctccttctactgcctggaatattttccatctcaaatgctgcgaactggaaacaattttgaattcagctacaccttcgaggacgtgcctttccacagcagctacgcacacagccagagcttggaccgactgatgaatcctctcatcgaccagtacctgtactacttatccagaactcagtccacaggaggaactcaaggtacccagcaattgttattttctcaagctgggcctgcaaacatgtcggctcaggctaagaactggctacctggaccttgctaccggcagcagcgagtctctacgacactgtcgcaaaacaacaacagcaactttgcttggactggtgccaccaaatatcacctgaacggaagagactctttggtaaatcccggtgtcgccatggcaacccacaaggacgacgaggaacgcttcttcccgtcgagtggagtcctgatgttcggaaaacagggtgctggaagagacaatgtggactacagcagcgttatgctaaccagcgaagaagaaattaaaaccactaaccccgtagccacagaacaatacggtgtggtggctgacaacttgcagcaaaccaatacagggcctattgtgggaaatgtcaacagccaaggagccttacctggcatggtctggcagaaccgagacgtgtacctgcagggtcccatctgggccaagattcctcacacggacggcaacttccacccttcaccgctaatgggaggatttggactgaagcacccacctcctcagatcctgatcaagaacacgccggtacctgcggatcctccaacaacgttcagccaggcgaaattggcttccttcattacgcagtacagcaccggacaggtcagcgtggaaatcgagtgggagctgcagaaggagaacagcaaacgctggaacccagagattcagtacacttcaaactactacaaatctacaaatgtggactttgctgtcaatacagagggaacttattctgagcctcgccccattggtactcgttacctcacccgtaatctgtaa

SEQ ID NO: 259 - protein, 738 aa, Artificial Sequence
  Description of Artificial Sequence: Synthetic polypeptide
MAADGYLPDWLEDNLSEGIREWWDLKPGAPKPKANQQKQDDGRGLVLPGYKYLGPFNGLDKGEPVNAADAAALEHDKAYDQQLKAGDNPYLRYNHADAEFQERLQEDTSFGGNLGRAVFQAKKRVLEPLGLVEEAAKTAPGKKRPVEPSPQRSPDSSTGIGKKGQQPAKKRLNFGQTGDSESVPDPQPIGEPPAGPSGLGSGTMAAGGGAPMADNNEGADGVGSSSGNWHCDSTWLGDRVITTSTRTWALPTYNNHLYKQISNGTSGGSTNDNTYFGYSTPWGYFDFNRFHCHFSPRDWQRLINNNWGFRPKRLSFKLFNIQVKEVTQNEGTKTIANNLTSTIQVFTDSEYQLPYVLGSAHQGCLPPFPADVFMIPQYGYLTLNNGSQAVGRSSFYCLEYFPSQMLRTGNNFEFSYTFEDVPFHSSYAHSQSLDRLMNPLIDQYLYYLSRTQSTGGTQGTQQLLFSQAGPANMSAQAKNWLPGPCYRQQRVSTTLSQNNNSNFAWTGATKYHLNGRDSLVNPGVAMATHKDDEERFFPSSGVLMFGKQGAGRDNVDYSSVMLTSEEEIKTTNPVATEQYGVVADNLQQTNTGPIVGNVNSQGALPGMVWQNRDVYLQGPIWAKIPHTDGNCHPSPLMGGFGLKHPPPQILIKNTPVPADPPTTFSQAKLASFITQYSTGQVSVEIEWELQKENSKRWNPEIQYTSNYYKSTNVDFAVNTEGTYSEPRPIGTRYLTRNL

SEQ ID NO: 260 - protein, 738 aa, Artificial Sequence
  Description of Artificial Sequence: Synthetic polypeptide
MAADGYLPDWLEDNLSEGIREWWDLKPGAPKPKANQQKQDDGRGLVLPGYKYLGPFNGLDKGEPVNAADAAALEHDKAYDQQLKAGDNPYLRYNHADAEFQERLQEDTSFGGNLGRAVFQAKKRVLEPLGLVEEGAKTAPGKKRPVEPSPQRSPDSSTGIGKKGQQPARKRLNFGRTGDSESVPDPQPIGEPPAAPSSVGSGTMAAGGGAPMADNNEGADGVGSSSGNWHCDSTWLGDRVITTSTRTWALPTYNNHLYKQISNGTSGGSTNDNTYFGYSTPWGYLDFNRFHCHFSPRDWQRLINNNWGFRPKRLSFKLFNIQVKEVTQNEGTKTIANNLASTIQVFTDSEYQPPYVLGSAHQGCLPPFPADVFMIPQYGYLTLNNGSQAVGRSSFYCLEYFPSQMLRTGNNFSFSYTFEDVPFHSSYAHSQSLDRLMNPLIDQYLYYLSRTQSTGGTAGTQQLLFSRAGPSNMSAQARNWLPGPCYRQQRVSTTLSQNNNSNFAWTGATKYHLNGRDSLVNPGVAMATNKDDEDRFFPSSGILMFGKQGAGKDNVDYSNVMLTSEEEIKTTNPVATEQYGVVADNLQQQNTAPTVGAVNSQGALPGMVWQNRDVYLQGPIWAKIPHTDGNFHPSPLMGGFGLKHPPPQILIKNTPVPADPPTAFNQAKLNSFIAQYSTGQVSVEIEWELQKENSKRWNPEIQYTSNYYKSTNADFAVNTEGVYSEPRPIGTRYLTRNL

SEQ ID NO: 261 - DNA, 2217 bp, Artificial Sequence
  Description of Artificial Sequence: Synthetic polynucleotide
atggctgccgatggttatcttccagattggctcgaggacaacctctctgagggcattcgcgagtggtgggacctgaaacctggagccccgaaacccaaagccaaccagcaaaagcaggacgacggccggggtctggtgcttcctggctacaagtacctcggacccttcaacggactcgacaagggggagcccgtcaacgcggcggacgcagcggccctcgagcacgacaaggcctacgaccagcagctcaaagcgggtgacaatccgtacctgcggtataatcacgccgacgccgagtttcaggagcgtctgcaagaagatacgtcttttgggggcaacctcgggcgagcagtcttccaggccaagaagcgggttctcgaacctctcggtctggttgaggaaggcgctaagacggctcctggaaagaagagaccggtagagccgtcaccacagcgttcccccgactcctccacgggcatcggcaagaaaggccagcagcccgccagaaagagactcaatttcggtcggactggcgactcagagtcagtccccgaccctcaacctatcggagaacctccagcagcgccctctagtgtgggatctggtacaatggctgcaggcggtggcgcaccaatggcagacaataacgaaggtgccgacggagtgggtagttcctcgggaaattggcattgcgattccacatggctgggcgacagagttatcaccaccagcacccgaacctgggccctgcccacctacaacaaccacctctacaagcaaatctccaacgggacctcgggaggcagcaccaacgacaacacctactttggctacagcaccccctgggggtatcttgactttaacagattccactgccacttctcaccacgtgactggcagcgactcatcaacaacaactggggattccggcccaagagactcagcttcaagctcttcaacatccaggtcaaagaggtcacgcagaatgaaggcaccaagaccatcgccaataacctcgccagcaccatccaggtgtttacggactcggaataccagccgccgtacgtcctcggctctgcccaccagggctgcctgcctccgttcccggcggacgtcttcatgattcctcagtacggctacctgactctcaacaacggtagtcaggccgtgggacgttcctccttctactgcctggagtacttcccctctcagatgctgagaacgggcaacaacttttccttcagctacactttcgaggacgtgcctttccacagcagctacgcgcacagccagagtttggacaggctgatgaatcctctcatcgaccagtacctgtactacctgtcaagaacccagtctacgggaggcacagcgggaacccagcagttgctgttttctcgggccgggcctagcaacatgtcggctcaggccagaaactggctgcctggaccctgctacagacagcagcgcgtctccacgacactgtcgcaaaacaacaacagcaactttgcctggactggtgccaccaagtatcatctgaacggcagagactctctggtgaatccgggcgtcgccatggcaaccaacaaggacgacgaggaccgcttcttcccatccagcggcatcctcatgtttggcaagcagggagctggaaaagacaacgtggactatagcaacgtgatgctaaccagcgaggaagaaatcaagaccaccaaccccgtggccacagaacagtatggcgtggtggctgataacctacagcagcaaaacaccgctcctactgtgggggccgtcaacagccagggagccttacctggcatggtctggcagaaccgggacgtgtacctgcagggtcctatttgggccaagattcctcacacagatggcaactttcacccgtctcctttaatgggcggctttggacttaaacatccgcctcctcagatcctcatcaaaaacactcctgttcctgcggatcctccaacagcgttcaaccaggccaagctgaattctttcatcgcgcagtacagcaccggacaagtcagcgtggagatcgagtgggagctgcagaaggagaacagcaagcgctggaacccagagattcagtatacttccaactactacaaatctacaaatgcggactttgctgttaatactgagggtgtttactctgagcctcgccccattggcactcgttacctcacccgtaatctgtaa

SEQ ID NO: 262 - DNA, 2208 bp, Artificial Sequence
  Description of Artificial Sequence: Synthetic polynucleotide
atggctgccgatggttatcttccagattggctcgaggacactctctctgaaggaataagacagtggtggaagctcaaacctggcccaccaccaccaaagcccgcagagcggcataaggacgacagcaggggtcttgtgcttcctgggtacaagtacctcggacccttcaacggactcgacaagggggagccggtcaacgaggcagacgccgcggccctcgagcacgacaaggcctacgaccggcagctcgacagcggagacaacccgtacctcaagtacaaccacgccgacgcagagtttcaggagcgccttaaagaagatacgtcttttgggggcaacctcggacgagcagtcttccaggcgaaaaagagggttcttgaacctctgggcctggttgaggagcctgttaagacggctccgggaaaaaagaggccggtagagcactctcctgtggagccagactcctcctcgggaaccggaaaagcgggccagcagcctgcaagaaaaagattaaattttggtcagactggagacgcagactccgtacctgacccccagcctctcggacagccaccagcagccccctctggtctgggatctactacaatggctacaggcagtggcgcaccaatggcagacaataacgagggtgccgatggagtgggtaattcctcaggaaattggcattgcgattcccaatggctgggcgacagagtcatcaccaccagcacccgaacctgggccctgcccacatacaacaaccacctctacaagcaaatctccagccaatcaggagccagcaacgacaaccactactttggctacagcaccccctgggggtattttgacttcaacagattccactgccacttttcaccacgtgactggcaaagactcgtcaacaacaaccggggattccggcccaaaagactcaacttcaagctctttaatattcaagtcaaagaggtcacgcagaatgacggtacgacgacgattgccaataaccttaccagcacggttcaggtgtttactgactcggagtaccagctcccgtacgtcctgggctcggcgcatcaaggatgcctcccgccgtttccagcggacgtcttcatggtcccacagtatggatacctcaccctgaacaacgggagtcaggcggtaggacgctcttccttttactgcctggagtactttccttctcagatgctgcgtactggaaacaactttcagttcagctacacttttgaagacgtgcctttccacagcagctacgctcacagccagagtctggatcggctgatgaatcctctgatcgaccagtacctgtattatctgaacaagacacaaacaaatagtggaactcttcagcagtctcggctactgtttagccaagctggaccaaccaacatgtctcttcaagctaaaaactggctgcctggaccttgctacagacagcagcgtctgtcaaaacaggcaaacgacaacaacaacagcaactttccctggactgcagctacaaagtatcatctaaatggccgggactcgttggttaatccaggaccagctatggccagtcacaaggatgacgaagaaaagtttttccccatgcatggaaccctgatatttggtaaacaaggaacaaatgccaacgacgcggatttggaaaatgtcatgattacagatgaagaagaaatcagggccaccaatcccgtggctacggagcagtacgggactgtgtcaaataatttgcaaaactcaaacactggtccaactactggaactgtcaatcaccaaggagcgttacctggtatggtgtggcaggatcgagacgtgtacctgcagggacccatttgggccaagattcctcacaccgatggacactttcatccttctccactgatgggaggttttggactcaaacacccgcctcctcagatcatgatcaaaaacactcccgttccagccaatcctcccacaaacttcagttctgccaagtttgcttctttcatcacacagtattccacgggacaggtcagcgtggagatcgagtgggagctgcagaaggagaacagcaaacgctggaatcccgaaattcagtacacttccaactacaacaagtctgttaatgtggactttactgtggacactaatggtgtgtattcagagcctcgccccattggcaccagatacctgactcgtaatctgtaa

SEQ ID NO: 263 - protein, 735 aa, Artificial Sequence
  Description of Artificial Sequence: Synthetic polypeptide
MAADGYLPDWLEDTLSEGIRQWWKLKPGPPPPKPAERHKDDSRGLVLPGYKYLGPFNGLDKGEPVNEADAAALEHDKAYDRQLDSGDNPYLKYNHADAEFQERLKEDTSFGGNLGRAVFQAKKRVLEPLGLVEEPVKTAPGKKRPVEHSPVEPDSSSGTGKAGQQPARKRLNFGQTGDADSVPDPQPLGQPPAAPSGLGSTTMATGSGAPMADNNEGADGVGNSSGNWHCDSQWLGDRVITTSTRTWALPTYNNHLYKQISSQSGASNDNHYFGYSTPWGYFDFNRFHCHFSPRDWQRLVNNNRGFRPKRLNFKLFNIQVKEVTQNDGTTTIANNLTSTVQVFTDSEYQLPYVLGSAHQGCLPPFPADVFMVPQYGYLTLNNGSQAVGRSSFYCLEYFPSQMLRTGNNFQFSYTFEDVPFHSSYAHSQSLDRLMNPLIDQYLYYLNKTQTNSGTLQQSRLLFSQAGPTNMSLQAKNWLPGPCYRQQRLSKQANDNNNSNFPWTAATKYHLNGRDSLVNPGPAMASHKDDEEKFFPMHGTLIFGKQGTNANDADLENVMITDEEEIRATNPVATEQYGTVSNNLQNSNTGPTTGTVNHQGALPGMVWQDRDVYLQGPIWAKIPHTDGHFHPSPLMGGFGLKHPPPQIMIKNTPVPANPPTNFSSAKFASFITQYSTGQVSVEIEWELQKENSKRWNPEIQYTSNYNKSVNVDFTVDTNGVYSEPRPIGTRYLTRNL

SEQ ID NO: 264 - protein, 738 aa, Artificial Sequence
  Description of Artificial Sequence: Synthetic polypeptide
MAADGYLPDWLEDNLSEGIREWWDLKPGAPKPKANQQKQDDGRGLVLPGYKYLGPFNGLDKGEPVNAADAAALEHDKAYDQQLKAGDNPYLRYNHADAEFQERLQEDTSFGGNLGRAVFQAKKRVLEPLGLVEEAAKTAPGKKRPVEPSPQRSPDSSTGIGKKGQQPAKKRLSFGQTGDSESVPDPQPIGEPPAGPSGLGSGTMAAGGGAPMADNNEGADGVGSSSGNWHCDSTWLGDRVITTSTRTWALPTYNNHLYKQISNGTSGGSTNDNTYFGYSTPWGYFDFNRFHCHFSPRDWQRLINNNWGFRPKRLSFKLFNIQVKEVTQNEGTKTIANNLTSTIQVFTDSEYQLPYVLGSAHQGCLPPFPADVFMIPQYGYLTLNNGSQAVGRSSFYCLEYFPSQMLRTGNNSEFSYTFEDVPFHSSYAHSQSLDRLMNPLIDQYLYYLSRTQSTGGTQGTQQLLFSQAGPANMSAQAKNWLPGPCYRQQRVSTTLSQNNNSNFAWTGATKYHLNGRDSLVNPGVAMATHKDDEERFFPSSGVLMFGKQGAGRDNVDYSSVMLTSEEEIKTTNPVATEQYGVVADNLQQTNTGPIVGNVNSQGALPGMVWQNRDVYLQGPIWAKIPHTDGNFHPSPLMGGFGLKHPPPQILIKNTPVPADPPTTFSQAKLASFITQYSTGQVSVEIEWELQKENSKRWNPEIQYTSNYYKSTNVDFAVNTEGTYSEPRPIGTRYLTRNL

SEQ ID NO: 265 - DNA, 2217 bp, Artificial Sequence
  Description of Artificial Sequence: Synthetic polynucleotide
atggctgctgacggttatcttccagattggctcgaggacaacctctctgagggcattcgcgagtggtgggacctgaaacctggagcccccaagcccaaggccaaccagcagaagcaggacgacggccggggtctggtgcttcctggctacaagtacctcggacccttcaacggactcgacaagggggagcccgtcaacgcggcggacgcagcggccctcgagcacgacaaggcctacgaccagcagctcaaagcgggtgacaatccgtacctgcggtataaccacgccgacgccgagtttcaggagcgtctgcaagaagatacgtcttttgggggcaacctcgggcgagcagtcttccaggccaagaagcgggttctcgaacctctcggtctggttgaggaagctgctaagacggctcctggaaagaagagaccggtagaaccgtcacctcagcgttcccccgactcctccacgggcatcggcaagaaaggccagcagcccgctaaaaagagactgagctttggtcagactggcgactcagagtcagtccccgaccctcaaccaatcggagaaccaccagcaggcccctctggtctgggatctggtacaatggctgcaggcggtggcgctccaatggcagacaataacgaaggcgccgacggagtgggtagttcctcaggaaattggcattgcgattccacatggctgggcgacagagtcatcaccaccagcacccgaacctgggccctgcccacctacaacaaccacctctacaagcaaatatccaatgggacatcgggaggaagcaccaacgacaacacctacttcggctacagcaccccctgggggtattttgacttcaacagattccactgccacttctcaccacgtgactggcagcgactcatcaacaacaactggggattccggccaaaaagactcagcttcaagctcttcaacatccaggtcaaggaggtcacgcagaatgaaggcaccaagaccatcgccaataaccttaccagcacgattcaggtatttacggactcggaataccagctgccgtacgtcctcggctccgcgcaccagggctgcctgcctccgttcccggcggacgtcttcatgattccccagtacggctaccttacactgaacaatggaagtcaagccgtaggccgttcctccttctactgcctggaatattttccatctcaaatgctgcgaactggaaacaattctgaattcagctacaccttcgaggacgtgcctttccacagcagctacgcacacagccagagcttggaccgactgatgaatcctctcatcgaccagtacctgtactacttatccagaactcagtccacaggaggaactcaaggtacccagcaattgttattttctcaagctgggcctgcaaacatgtcggctcaggctaagaactggctacctggaccttgctaccggcagcagcgagtctctacgacactgtcgcaaaacaacaacagcaactttgcttggactggtgccaccaaatatcacctgaacggaagagactctttggtaaatcccggtgtcgccatggcaacccacaaggacgacgaggaacgcttcttcccgtcgagtggagtcctgatgtttggaaaacagggtgctggaagagacaatgtggactacagcagcgttatgctaaccagcgaagaagaaattaaaaccactaaccctgtagccacagaacaatacggtgtggtggctgacaacttgcagcaaaccaatacagggcctattgtgggaaatgtcaacagccaaggagccttacctggcatggtctggcagaaccgagacgtgtacctgcagggtcccatctgggccaagattcctcacacggacggcaacttccacccttcaccgctaatgggaggatttggactgaagcacccacctcctcagatcctgatcaagaacacgccggtacctgcggatcctccaacaacgttcagccaggcgaaattggcttccttcattacgcagtacagcaccggacaggtcagcgtggaaatcgagtgggagctgcagaaggagaacagcaaacgctggaacccagagattcagtacacttcaaactactacaaatctacaaatgtggactttgctgtcaatacagagggaacttattctgagcctcgccccattggtactcgttacctcacccgtaatctgtaa

SEQ ID NO: 266 - protein, 738 aa, Artificial Sequence
  Description of Artificial Sequence: Synthetic polypeptide
MAADGYLPDWLEDNLSEGIREWWDLKPGAPKPKANQQKQDDGRGLVLPGYKYLGPFNGLDKGEPVNAADAAALEHDKAYDQQLKAGDNPYLRYNHADAEFQERLQEDTSFGGNLGRAVFQAKKRVLEPLGPVEEAAKTAPGKKRPVEPPPQRSPDSSTGIGKKGQQPAKKRLNFGQTGDSESVPDPQPIGEPPAGPSGLGSGTMAAGGGAPMADNNEGADGVGSSSGNWHCDSTWLGDRVITTSTRTWALPTYNNHLYKQISNGTSGGSTNDNTYFGYSTPWGYFDFNRFHCHFSPRDWQRLINNNWGFRPKRLSFKLFNIQVKEVTQNEGTKTVANNLTSTIQVFTDSEYQLPYVLGSAHQGCLPPFPADVFMIPQYGYLTLNNGSQAVGRSSFYCLEYFPSQMLRTGNNFEFSYTFEDVPFHSSYAHSQSLDRLMNPLIDQYLYYLSRTQSTGGTQGTQQLLFSQAGPANMSAQAKNWLPGPCYRQQRVSTTLSQNNNSNFAWTGATKYHLNGRDSLVNPGVAMATHKDDEERFFPSSGVLMFGKQGAGRDNVDYSSVMLTSEEEIKTTNPVATEQYGVVADNLQQTNTGPIVGNVNSQGALPGMVWQNRDVYLQGPIWAKIPHTDGNFHPSPLMGGFGLKHPPPQILIKNTPVPADPPTTFSQAKLASFITQYSTGQVSVEIEWELQKENSKRWNPEIQYTSNYYKSTNVDFAVNTEGTYSEPRPIGTRYLTRNL

SEQ ID NO: 267 - DNA, 2217 bp, Artificial Sequence
  Description of Artificial Sequence: Synthetic polynucleotide
atggctgctgacggttatcttccagattggctcgaggacaacctctctgagggcattcgcgagtggtgggacctgaaacctggagcccccaagcccaaggccaaccagcagaagcaggacgacggccggggtctggtgcttcctggctacaagtacctcggacccttcaacggactcgacaagggggagcccgtcaacgcggcggacgcagcggccctcgagcacgacaaggcctacgaccagcagctcaaagcgggtgacaatccgtacctgcggtataaccacgccgacgccgagtttcaggagcgtctacaagaagatacgtcttttgggggcaacctcgggcgagcagtcttccaggccaagaagcgggttctcgaacctctcggtccggttgaggaagctgctaagacggctcctggaaagaagagaccggtagaaccgccacctcagcgttcccccgactcctccacgggcatcggcaagaaaggccagcagcccgctaaaaagagactgaactttggtcagactggcgactcagagtcagtccccgaccctcaaccaatcggagaaccaccagcaggcccctctggtctgggatctggtacaatggctgcaggcggtggcgctccaatggcagacaataacgaaggcgccgacggagtgggtagttcctcaggaaattggcattgcgattccacatggctgggcgacagagtcatcaccaccagcacccgaacctgggccctgcccacctacaacaaccacctctacaagcaaatatccaatgggacatcgggaggaagcaccaacgacaacacctacttcggctacagcaccccctgggggtattttgacttcaacagattccactgccacttctcaccacgtgactggcagcgactcatcaacaacaactggggattccggccaaaaagactcagcttcaagctcttcaacatccaggtcaaggaggtcacgcagaatgaaggcaccaagaccgtcgccaataaccttaccagcacgattcaggtatttacggactcggaataccagctgccgtacgtcctcggctccgcgcaccagggctgcctgcctccgttcccggcggacgtcttcatgattccccagtacggctaccttacactgaacaatggaagtcaagccgtaggccgttcctccttctactgcctggaatattttccatctcaaatgctgcgaactggaaacaattttgaattcagctacaccttcgaggacgtgcctttccacagcagctacgcacacagccagagcttggaccgactgatgaatcctctcatcgaccagtacctgtactacttatccagaactcagtccacaggaggaactcaaggtacccagcaattgttattttctcaagctgggcctgcaaacatgtcggctcaggctaagaactggctacctggaccttgctaccggcagcagcgagtctctacgacactgtcgcaaaacaacaacagcaactttgcttggactggtgccaccaaatatcacctgaacggaagagactctttggtaaatcccggtgtcgccatggcaacccacaaggacgacgaggaacgcttcttcccgtcgagtggagtcctgatgtttggaaaacagggtgctggaagagacaatgtggactacagcagcgttatgctaaccagcgaagaagaaattaaaaccactaaccctgtagccacagaacaatacggtgtggtggctgacaacttgcagcaaaccaatacagggcctattgtgggaaatgtcaacagccaaggagccttacctggcatggtctggcagaaccgagacgtgtacctgcagggtcccatctgggccaagattcctcacacggacggcaacttccacccttcaccgctaatgggaggatttggactgaagcacccacctcctcagatcctgatcaagaacacgccggtacctgcggatcctccaacaacgttcagccaggcgaaattggcttccttcattacgcagtacagcaccggacaggtcagcgtggaaatcgagtgggagctgcagaaggagaacagcaaacgttggaacccagagattcagtacacttcaaactactacaaatctacaaatgtggactttgctgtcaatacagagggaacttattctgagcctcgccccattggtactcgttacctcacccgtaatctgtaa

SEQ ID NO: 268 - protein, 738 aa, Artificial Sequence
  Description of Artificial Sequence: Synthetic polypeptide
MAADGYLPDWLEDNLSEGIREWWDLKPGAPKPKANQQKQDDGRGLVLPGYKYLGPFNGLDKGEPVNAADAAALEHDKAYDQQLKAGDNPYLRYNHADAEFQERLQEDTSFGGNLGRAVFQAKKRVLEPLGLVEEAAKTAPGKKRPVEPSPQRSPDSSTGIGKKGQQPAKKRLNFGQTGDSESVPDPQPIGEPPAGPSGLGSGTMAAGGGAPMADNNEGADGVGSSSGNWHCDSTWLGDRVITTSTRTWALPTYNNHLYKQISNGTSGGSTNDNTYFGYSTPWGYFDFNRFHCHFSPRDWQRLINNNWGFRPKRLSFKLFNIQVKEVTQNEGTKTIANNLTSTIQVFTDSEYQLPYVLGSAHQGCLPPFPADVFMIPQYGYLTLNNGSQAVGRSSFYCLEYFPSQMLRTGNNFEFSYTFEDVPFHSSYAHSQSLDRLMNPLIDQYLYYLSRTQSTGGTQGTQQLLFSQAGPANMSAQAKNWLPGPCYRQQRVSTTLSQSNNSNFAWTGATKYHLNGRDSLVNPGVAMATHKDDEERFFPSSGVLMFGKQGAGRDNVDYSSVMLTSEEEIKTTNPVATEQYGVVADNLQQTNTGPIVGNVNSQGALPGMVWQNRDVYLQGPIWAKIPHTDGNFHPSPLMGGLGLKHPPPQILIKNTPVPADPPTTFSQAKLASFITQYSTGQVSVEIEWELQKENSKRWNPEIQYTSNYYKSTNVDFAVNTEGTYSEPRPIGTRYLTRNL

SEQ ID NO: 269 - DNA, 2217 bp, Artificial Sequence
  Description of Artificial Sequence: Synthetic polynucleotide
atggctgctgacggttatcttccagattggctcgaggacaacctctctgagggcattcgcgagtggtgggacctgaaacctggagcccccaagcccaaggccaaccagcagaagcaggacgacggccggggtctggtgcttcctggctacaagtacctcggacccttcaacggactcgacaagggggagcccgtcaacgcggcggacgcagcggccctcgagcacgacaaggcctacgaccagcagctcaaagcgggtgacaatccgtacctgcggtataaccacgccgacgccgagtttcaggagcgtctgcaagaagatacgtcttttgggggcaacctcgggcgagcagtcttccaggccaagaagcgggttctcgaacctctcggtctggttgaggaagcggctaagacggctcctggaaagaagagaccggtagaaccgtcacctcagcgttcccccgactcctccacgggcatcggcaagaaaggccagcagcccgctaaaaagagactgaactttggtcagactggcgactcagagtcagtccccgaccctcaaccaatcggagaaccaccagcaggcccctctggtctgggatctggtacaatggctgcaggcggtggcgctccaatggcagacaataacgaaggcgccgacggagtgggtagttcctcaggaaattggcattgcgattccacatggctgggcgacagagtcatcaccaccagcacccgaacctgggccctgcccacctacaacaaccacctctacaagcaaatatccaatgggacatcgggaggaagcaccaacgacaacacctacttcggctacagcaccccctgggggtattttgacttcaacagattccactgccacttctcaccacgtgactggcagcgactcatcaacaacaactggggattccggccaaaaagactcagcttcaagctcttcaacatccaggtcaaggaggtcacgcagaatgaaggcaccaagaccatcgccaataaccttaccagcacgattcaggtatttacggactcggaataccagctgccgtacgtcctcggctccgcgcaccagggctgcctgcctccgttcccggcggacgtcttcatgattccccagtacggctaccttacactgaacaatggaagtcaagccgtaggccgttcctccttctactgcctggaatattttccatctcaaatgctgcgaactggaaacaattttgaattcagctacaccttcgaggacgtgcctttccacagcagctacgcacacagccagagcttggaccgactgatgaatcctctcatcgaccagtacctgtactacttatccagaactcagtccacaggaggaactcaaggtacccagcaattgttattttctcaagctgggcctgcaaacatgtcggctcaggctaagaactggctacctggaccttgctaccggcagcagcgagtctctacgacactgtcgcaaagcaacaacagcaactttgcttggactggtgccaccaaatatcacctgaacggaagagactctttggtaaatcccggtgtcgccatggcaacccacaaggacgacgaggaacgcttcttcccgtcgagtggagtcctgatgtttggaaaacagggtgctggaagagacaatgtggactacagcagcgttatgctaaccagcgaagaagaaattaaaaccactaaccctgtagccacagaacaatacggtgtggtggctgacaacttgcagcaaaccaatacagggcctattgtgggaaatgtcaacagccaaggagccttacctggcatggtctggcagaaccgagacgtgtacctgcagggtcccatctgggccaagattcctcacacggacggcaacttccacccttcaccgctaatgggaggacttggactgaagcacccacctcctcagatcctgatcaagaacacgccggtacctgcggatcctccaacaacgttcagccaggcgaaattggcttccttcattacgcagtacagcaccggacaggtcagcgtggaaatcgagtgggagctgcagaaggagaacagcaaacgctggaacccagagattcagtacacttcaaactactacaaatctacaaatgtggactttgctgtcaatacagagggaacttattctgagcctcgccccattggtactcgttacctcacccgtaatctgtaa

SEQ ID NO: 270 - protein, 737 aa, Artificial Sequence
  Description of Artificial Sequence: Synthetic polypeptide
MAADGYLPDWLEDNLSEGIREWWDLKPGAPKPKANQQKQDDGRGLVLPGYKYLGPFNGLDKGEPVNAADAAALEHDKAYDQQLKAGDNPYPRYNHADAEFQERLQEDTPFGGNLGRAVFQAKKRVLEPLGLVEEAAKTAPGKKRPVEPSPQRSPDSSTGIGKKGQQPAKKRLNFGQTGDSESVPDPQPIGEPPAGPSGLGSGTMAAGGGAPMADNNEGADGVGNASGNWHCDSTWLGDRVITTSTRTWALPTYNNHLYKQISSASTGASNDNHYFGYSTPWGYFDFNRFHCHFSPRDWQRLINNNWGFRPKRLNFKLFNIQVKEVTTNDGVTTIANNLTSTVQVFSDSEYQLPYVLGSAHQGCLPPFPADVFMIPQYGYLTLNNGSQAVGRSSFYCLEYFPSQMLRTGNNFTFSYTFEEVPLHSSYAHSQSLDRLMNPLIVQYLYYLNRTQNQSGSAQNKDLLFSRGSPAGMSVQPKNWLPGPCYRQQRVSKTKTDNNNSNFTWTGASKYNLNGRESIINPGTAMASHKDDEDKFFPMSGVMIFGKESAGASNTALDNVMITDEEEIKATNPVATERFGTVAVNFQSSSTDPATGDVHAMGALPGMVWQDRDVYLQGPIWAKIPHTDGHFHPSPLMGGFGLKNPPPQILIKNTPVPANPPAEFSATKFASFITQYSTGQVSVEIEWELQKENSKRWNPEVQYTSNYAKSASVDFTVDNNGLYTEPRPIGTRYLTRPL

SEQ ID NO: 271 - protein, 737 aa, Artificial Sequence
  Description of Artificial Sequence: Synthetic polypeptide
MAADGYLPDWLEDNLSEGIREWWDLKPGAPKPKANQQKQDDGRGLVLPGYKYLGPFNGLDKGEPVNAADAAALEHDKAYDQQLKAGDNPYPRYNHADAEFQERLQEDTSFGGNLGRAVFQAKKRVLEPLGLVEEAAKTAPGKKRPVEPSPQRSPDSSTGIGKKGQQPAKKRLNFGQTGDSESVPDPQPIGEPPAGPSGLGSGTMAAGGGAPMADNNEGADGVGNASGNWHCDSTWLGDRVITTSTRTWALPTYNNHLYKQISSASTGASNDNHYFGYSTPWGYFDFNRFHCHFSPRDWQRLINNNWGFRPKRLNFKLFNIQVKEVTTNDGVTTIANNLTSTVQVFSDSEYQLPYVLGSAHQGCLPPFPADVFMIPQYGYLTLNNGSQAVGRSSFYCLEYFPSQMLRTGNNFTFSYTFEEVPLHSSYAHSQSLDRLMNPLIDQYLYYLNRTQNQSGSAQNKDLLFSRGSPAGMSVQPKNWLPGPCYRQQRVSKTKTDNNNSNFTWTGASKYNLNGRESIINPGTAMASHKDDEDKFFPMSGVMIFGKESAGASNTALDNVMITDEEEIKATNPVATERFGTVAVNFQSSSTDPATGDVHAMGALPGMVWQDRDVYLQGPIWAKIPHTDGHFHPSPLMGGFGLKNPPPQILIKNTPVPANPPAEFSATKFASFITQYSTGQVSVEIEWELQKENSKRWNPEVQYTSNYAKSASVDFTVDNNGLYTEPRPIGTRYLTRPL

SEQ ID NO: 272 - DNA, 2214 bp, Artificial Sequence
  Description of Artificial Sequence: Synthetic polynucleotide
atggctgctgacggttatcttccagattggctcgaggacaacctctctgagggcattcgcgagtggtgggacctgaaacctggagcccccaagcccaaggccaaccagcagaagcaggacgacggccggggtctggtgcttcctggctacaagtacctcggacccttcaacggactcgacaagggggagcccgtcaacgcggcggacgcagcggccctcgagcacgacaaggcctacgaccagcagctcaaagcgggtgacaatccgtacccgcggtataaccacgccgacgccgagtttcaggagcgtctgcaagaagatacgccttttgggggcaacctcgggcgagcagtcttccaggccaagaagcgggttctcgaacctctcggtctggttgaggaagctgctaagacggctcctggaaagaagagaccggtagaaccgtcacctcagcgttcccccgactcctccacgggcatcggcaagaaaggccagcagcccgctaaaaagagactgaactttggtcagactggcgactcagagtcagtccccgaccctcaaccaatcggagaaccaccagcaggcccctctggtctgggatctggtacaatggctgcaggcggtggcgctccaatggcagacaataacgaaggcgccgacggagtgggtaatgcctcaggaaattggcattgcgattccacatggctgggcgacagagtcatcaccaccagcacccgcacctgggccttgcccacctacaataaccacctctacaagcaaatctccagtgcttcaacgggggccagcaacgacaaccactacttcggctacagcaccccctgggggtattttgatttcaacagattccactgccacttttcaccacgtgactggcagcgactcatcaacaacaattggggattccggcccaagagactcaacttcaaactcttcaacatccaagtcaaggaggtcacgacgaatgatggcgtcacaaccatcgctaataaccttaccagcacggttcaagtcttctcggactcggagtaccagcttccgtacgtcctcggctctgcgcaccagggctgcctccctccgttcccggcggacgtgttcatgattccgcaatacggctacctgacgctcaacaatggcagccaagccgtgggacgttcatccttttactgcctggaatatttcccttctcagatgctgagaacgggcaacaactttaccttcagctacacctttgaggaagtgcctctccacagcagctacgcgcacagccagagcctggaccggctgatgaatcctctcatcgtccaatacctgtattacctgaacagaactcaaaatcagtccggaagtgcccaaaacaaggacttgctgttcagccgtgggtctccagctggcatgtctgttcagcccaaaaactggctacctggaccctgttatcggcagcagcgcgtttctaaaacaaaaacagacaacaacaacagcaattttacctggactggtgcttcaaaatataacctcaatgggcgtgaatccatcatcaaccctggcactgctatggcctcacacaaagacgacgaagacaagttctttcccatgagcggtgtcatgatttttggaaaagagagcgccggagcttcaaacactgcattggacaatgtcatgattacagacgaagaggaaattaaagccactaaccctgtggccaccgaaagatttgggaccgtggcagtcaatttccagagcagcagcacagaccctgcgaccggagatgtgcatgctatgggagcattacctggcatggtgtggcaagatagagacgtgtacctgcagggtcccatttgggccaaaattcctcacacagatggacactttcacccgtctcctcttatgggcggctttggactcaagaacccgcctcctcagatcctcatcaaaaacacgcctgttcctgcgaatcctccggcggagttttcagctacaaagtttgcttcattcatcacccaatactccacaggacaagtgagtgtggaaattgaatgggagctgcagaaagaaaacagcaagcgctggaatcccgaagtgcagtacacatccaattatgcaaaatctgccagcgttgattttactgtggacaacaatggactttatactgagcctcgccccattggcacccgttaccttacccgtcccctgtaa

SEQ ID NO: 273 - protein, 736 aa, Artificial Sequence
  Description of Artificial Sequence: Synthetic polypeptide
MAADGYLPDWLEDTLSEGIRQWWKLRPGPPPPKPAERHKDDSRGLVLPGYKYLGPFNGLDKGEPVNEADAAALEHDKAYDRQLDSGDNPYLKYNHADAEFQERLKEDTSFGGNLGRAVFQAKKRVLEPLGLVEEGAETAPGKKRPVEQSPQGPDSSSGIGKTGQQPAKKRLNFGQTGDSESVPDPQPLGEPPATPAAVGPTTMASGGGAPMADNNEGADGVGNASGNWHCDSTWLGDRVITTSTRTWALPTYNNHLYKQISSASTGASNDNHYFGYSTPWGYFDFNRFHCHFSPRDWQRLINNNWGFRPKRLNFKLFNIQVKEVTTNDGVTTIANNLTSTVQVFSDSEYQLPYVLGSAHQGCLPPFPADVFMIPQYGYLTLNNGSQAVGRSSFYCLEYFPSQMLRTGNNFTFSYTFEEVPFHSSYAHSQSLDRLMNPLIDQYLYYPNRTQNQSGSAQNKDLLFSRGSPAGMSVQPKNWLPGPCYRQQRVSKTKTDNNNSNFTWTGASKYNLNGRESIINPGTAMASHKDDEDKFFPMSGVMIFGKESAGASNTALDNVMITDEEEIKATNPVATERFGTVAVNFQSSSTDPATGDVHAMGALPGMVWQGRDVYLQGPIWAKIPHTDGHFHPSPLMGGFGLKNPPPQILIKNTPVPANPPAEFSATKFASFITQYSTGQVSVEIEWELQKENSKRWNPEVQYTSNYAKSANVDFTVDNNGLYTEPRPIGTRYLTRPL

SEQ ID NO: 274 - DNA, 2211 bp, Artificial Sequence
  Description of Artificial Sequence: Synthetic polynucleotide
atggctgccgatggttatcttccagattggctcgaggacactctctctgaaggaataagacagtggtggaagctcagacctggcccaccaccaccaaagcccgcagagcggcataaggacgacagcaggggtcttgtgcttcctgggtacaagtacctcggacccttcaacggactcgacaagggagagccggtcaacgaggcagacgccgcggccctcgagcacgacaaagcctacgaccggcagctcgacagcggagacaacccgtacctcaagtacaaccacgccgacgcggagtttcaggagcgccttaaagaagatacgtcttttgggggcaacctcgggcgagcagtcttccaggccaagaagcgggttctcgaacctctcggtctggttgaggaaggcgctgagacggctcctggaaagaaacgtccggtagagcagtcgccacaagggccagactcctcctcgggcatcggcaagacaggccagcagcccgctaaaaagagactcaattttggtcagactggcgactcagagtcagtccccgatccacaacctctcggagaacctccagcaacccccgctgctgtgggacctactacaatggcttcaggcggtggcgcaccaatggcagacaataacgaaggcgccgacggagtgggtaatgcctcaggaaattggcattgcgattccacatggctgggcgacagagtcatcaccaccagcacccgcacctgggccttgcccacctacaataaccacctctacaagcaaatctccagtgcttcaacgggggccagcaacgacaaccactacttcggctacagcaccccctgggggtattttgatttcaacagattccactgccacttttcaccacgtgactggcagcgactcatcaacaacaattggggattccggcccaagagactcaacttcaaactcttcaacatccaagtcaaggaggtcacgacgaatgatggcgtcacaaccatcgctaataaccttaccagcacggttcaagtcttctcggactcggagtaccagcttccgtacgtcctcggctctgcgcaccagggctgcctccctccgttcccggcggacgtgttcatgattccgcaatacggctacctgacgctcaacaatggcagccaagccgtgggacgttcatccttttactgcctggaatatttcccttctcagatgctgagaacgggcaacaactttaccttcagctacacctttgaggaagtgcctttccacagcagctacgcgcacagccagagcctggaccggctgatgaatcctctcatcgaccaatacctgtattacccgaacagaactcaaaatcagtccggaagtgcccaaaacaaggacttgctgtttagccgtgggtctccagctggcatgtctgttcagcccaaaaactggctacctggaccctgttatcggcagcagcgcgtttctaaaacaaaaacagacaacaacaacagcaattttacctggactggtgcttcaaaatataacctcaatgggcgtgaatccatcatcaaccctggcactgctatggcctcacacaaagacgacgaagacaagttctttcccatgagcggtgtcatgatttttggaaaagagagcgccggagcttcaaacactgcattggacaatgtcatgattacagacgaagaggaaattaaagccactaaccctgtggccaccgaaagatttgggaccgtggcagtcaatttccagagcagcagcacagaccctgcgaccggagatgtgcatgctatgggagcattacctggcatggtgtggcaaggtagagacgtgtacctgcagggtcccatttgggccaaaattcctcacacagatggacactttcacccgtctcctcttatgggcggctttggactcaagaacccgcctcctcagatcctcatcaaaaacacgcctgttcctgcgaatcctccggcggagttttcagctacaaagtttgcttcattcatcacccaatactccacaggacaagtgagtgtggaaattgaatgggagctgcagaaagaaaacagcaagcgctggaatcccgaagtgcagtacacatccaattatgcaaaatctgccaacgttgattttactgtggacaacaatggactttatactgagcctcgccccattggcacccgttaccttacccgtcccctgtaa

SEQ ID NO: 275 - protein, 736 aa, Artificial Sequence
  Description of Artificial Sequence: Synthetic polypeptide
MAADGYLPDWLEDTLSEGIRQWWKLRPGPPPPKPAERHKDDSRGLVLPGYKYLGPFNGLDKGEPVNEADAAALEHDKAYDRQLDSGDNPYLKYNHADAEFQERLKEDTSFGGNLGRAVFQAKKRVLEPLGLVEEGAKTAPGKKRPVEQSPQGPDSSSGIGKTGQQPAKKRLNFGQTGDSESVPDPQPLGEPPATPAAVGPTTMASGGGAPMADNNEGADGVGNASGNWHCDSTWLGDRVITTSTRTWALPTYNNHLYKQISSASTGASNDNHYFGYSTPWGYFDFNRFHCHFSPRDWQRLINNNWGFRPKRLNFKLFNIQVKEVTTNDGVTTIANNLTSTVQVFSDSEYQLPYVLGSAHQGCLPPFPADVFMIPQYGYLTLNNGSQAVGRSSFYCLEYFPSQMLRTGNNFTFSYTFEEVPFHSSYAHSQSLDRLMNPLIDQYLYYPNRTQNQSGSAQNKDLLFSRGSPAGMSVQPKNWLPGPCYRQQRVSKTKTDNNNSNFTWTGASKYNLNGRESIINPGTAMASHKDDEDKFFPMSGVMIFGKESAGASNTALDNVMITDEEEIKATNPVATERFGTVAVNFQSSSTDPATGDVHAMGALPGMVWQGRDVYLQGPIWAKIPHTDGHFHPSPLMGGFGLKNPPPQILIKNTPVPANPPAEFSATKFASFITQYSTGQVSVEIEWELQKENSKRWNPEVQYTSNYAKSANVDFTVDNNGLYTEPRPIGTRYLTRPL

SEQ ID NO: 276 - protein, 736 aa, Artificial Sequence
  Description of Artificial Sequence: Synthetic polypeptide
MAADGYLPDWLEDTLSEGIRQWWKLRPGPPPPKPAERHKDDSRGLVLPGYKYLGPFNGLDKGEPVNEADAAALEHDKAYDRQLDSGDNPYLKYNHADAEFQERLKEDTSFGGNLGRAVFQAKKRVLEPLGLVEEGAKTAPGKKRPVEQSPQGPDSSSGIGKTGQQPAKKRLNFGQTGDSESVPDPQPLGEPPATPAAVGPTTMASGGGAPMADNNEGADGVGNASGNWHCDSTWLGDRVITTSTRTWALPTYNNHLYKQISSASTGASNDNHYFGYSTPWGYFDFNRFHCHFSPRDWQRLINNNWGFRPKRLNFKLFNIQVKEVTTNDGVTTIANNLTSTVQVFSDSEYQLPYVLGSAHQGCLPPFPADVFMIPQYGYLTLNNGSQAVGRSSFYCLEYFPSQMLRTGNNFTFSYTFEEVPFHSSYAHSQSLDRLMNPLIDQYLYYLNRTQNQSGSAQNKDLLFSRGSPAGMSVQPKNWLPGPCYRQQRVSKTKTDNNNSNFTWTGASKYNLNGRESIINPGTAMASHKDDEDKFFPMSGVMIFGKESAGASNTALDNVMITDEEEIKATNPVATERFGTVAVNFQSSSTDPATGDVHAMGALPGMVWQGRDVYLQGPIWAKIPHTDGHFHPSPLMGGFGLKNPPPQILIKNTPVPANPPAEFSATKFASFITQYSTGQVSVEIEWELQKENSKRWNPEVQYTSNYAKSANVDFTVDNNGLYTEPRPIGTRYLTRPL

SEQ ID NO: 277 - protein, 736 aa, Artificial Sequence
  Description of Artificial Sequence: Synthetic polypeptide
MAADGYLPDWLEDTLSEGIRQWWKLRPGPPPPKPAERHKDDSRGLVLPGYKYLGPFNGLDKGEPVNEADAAALEHDKAYDRQLDSGDNPYLKYNHADAEFQERLKEDTSFGGNLGRAVFQAKKRVLEPLGLVEEGAKTAPGKKRPVEQSPQGPDSSSGIGKTGQQPAKKRLNFGQTGDSESVPDPQPLGEPPATPAAVGPTTMASGGGAPMADNNEGADGVGNASGNWHCDSTWLGDRVITTSTRTWALPTYNNHLYKQISSASTGASNDNHYFGYSTPWGYFDFNRFHCHFSPRDWQRLINNNWGFRPKRLNFKLFNIQVKEVTTNDGVTTIANNLTSTVQVFSDSEYQLPYVLGSAHQGCLPPFPADVFMIPQYGYLTLNNGSQAVGRSSFYCLEYFPSQMLRTGNNFTFSYTFEEVPFHSSYAHSQSLDRLMNPLIDQYLYYLNRTQNQSGSAQNKDLLFSRGSPAGMSVQPKNWLPGPCYRQQRVSKTKTDNNNSNFTWTGASKYNLNGRESIINPGTAMASHKDDEDKFFPMSGVMIFGKESAGASNTALDNVMITDEEEIKATNPVATERFGTVAVNFQSSSTDPATGDVHAMGALPGMVWQDRDVYLQGPIWAKIPHTDGHFHPSPLMGGFGLKNPPPQILIKNTPVPANPPAEFSATKFASFITQYSTGQVSVEIEWELQKENSKRWNPEVQYTSNYAKSANVDFTVDNNGLYTEPRPIGTRYLTRPL

SEQ ID NO: 278 - DNA, 2208 bp, Artificial Sequence
  Description of Artificial Sequence: Synthetic polynucleotide
atggctgccgatggctatcttccagattggctcgaggacactctctctgaaggaataagacagtggtggaagctcaaacctggcccaccaccaccaaagcccgcagagcggcatagggacgacagcaggggtcttgtgcttcctgggtacaagtacctcggacccttcaacggactcgacaagggagagccggtcaacgaggcagacgccgcggccctcgagcacgacaaagcctacgaccggcagctcgacagcggagacaacccgtacctcaagtacaaccacgccgacgcggagtttcaggagcgccttaaagaagatacgtcttttgggggcaacctcggacgagcagtcttccaggcgaaaaagagggttcttgaacctctgggcctggttgaggaacctgttaagacggctccgggaaaaaagaggccggtagagcactctcctgtggagccagactcctcctcgggaaccggaaaggcgggccagcagcctgcaagaaaaagattgaattttggtcagactggagacgcagactcagtacctgacccccagcctctcggacagccaccagcagccccctctggtctgggaactaatacgatggctacaggcagtggcgcaccaatggcagacaataacgagggcgccgacggagtgggtaattcctcgggaaattggcattgcgattccacatggatgggcgacagagtcatcaccaccagcacccgaacctgggccctgcccacctacaacaaccacctctacaaacaaatttccagccaatcaggagcctcgaacgacaatcactactttggctacagcaccccttgggggtattttgacttcaacagattccactgccacttttcaccacgtgactggcaaagactcatcaacaacaactggggattccgacccaagagactcaacttcaagctctttaacattcaagtcaaagaggtcacgcagaatgacggtacgacgacgattgccaataaccttaccagcacggttcaggtgtttactgactcggggtaccagctcccgtacgtcctcggctcggcgcatcaaggatgcctcccgccgttcccagcagacgtcttcatggtgccacagtatggataccccaccctgaacaacgggagtcaggcagtaggacgctcttcattttactgcctggagtactttccttctcagatgctgcgtaccggaaacaactttaccttcagctacacttttgaggacgttcctttccacagcagctacgctcacagccagagtctggaccgtctcatgaatcctctcatcgaccagtacctgtattacttgagcacaacaaacactccaagtggaaccaccacgcagtcaaggcttcagttttctcaggccggagcgagtgacattcgggaccagtctaggaactggcttcctggaccctgttaccgccagcagcgagtatcaaagacatctgcggataacaacaacagtgaatactcgtggactggagctaccaagtaccacctcaatggcagagactctctggtgaatccgggcccggccgtggcaagccacaaggacgatgaagaaaagttttttcctcagagcggggttctcatctttgggaagcaaggctcagagaaaacaaatgtggacattgaaaaggtcatgattacagacgaagaggaaatcaggacaaccaatcccgtggctacggagcagtatggttctgtatctaccaacctccagagaggcaacagacaagcagctaccgcagatgtcaacacacaaggcgttcttccaggcatggtctggcaggacagagatgtgtaccttcaggggcccatctgggcaaagattccacacacggacggacattttcacccctctcccctcatgggtggattcggacttaaacaccctcctccacagattctcatcaagaacaccccggtacctgcgaatccttcgaccaccttcagtgcggcaaagtttgcttccttcatcacacagtactccacgggacaggtcagcgtggagatcgagtgggagctgcagaaggaaaacagcaaacgctggaatcccgaaattcagtacacttccaactacaacaagtctgttaatgtggactttactgtggacactaatggcgtgtattcagagcctcgccccattggcaccagatacctgactcgtaatctgtaa

SEQ ID NO: 279 - protein, 735 aa, Artificial Sequence
  Description of Artificial Sequence: Synthetic polypeptide
MAADGYLPDWLEDTLSEGIRQWWKLKPGPPPPKPAERHRDDSRGLVLPGYKYLGPFNGLDKGEPVNEADAAALEHDKAYDRQLDSGDNPYLKYNHADAEFQERLKEDTSFGGNLGRAVFQAKKRVLEPLGLVEEPVKTAPGKKRPVEHSPVEPDSSSGTGKAGQQPARKRLNFGQTGDADSVPDPQPLGQPPAAPSGLGTNTMATGSGAPMADNNEGADGVGNSSGNWHCDSTWMGDRVITTSTRTWALPTYNNHLYKQISSQSGASNDNHYFGYSTPWGYFDFNRFHCHFSPRDWQRLINNNWGFRPKRLNFKLFNIQVKEVTQNDGTTTIANNLTSTVQVFTDSGYQLPYVLGSAHQGCLPPFPADVFMVPQYGYPTLNNGSQAVGRSSFYCLEYFPSQMLRTGNNFTFSYTFEDVPFHSSYAHSQSLDRLMNPLIDQYLYYLSTTNTPSGTTTQSRLQFSQAGASDIRDQSRNWLPGPCYRQQRVSKTSADNNNSEYSWTGATKYHLNGRDSLVNPGPAVASHKDDEEKFFPQSGVLIFGKQGSEKTNVDIEKVMITDEEEIRTTNPVATEQYGSVSTNLQRGNRQAATADVNTQGVLPGMVWQDRDVYLQGPIWAKIPHTDGHFHPSPLMGGFGLKHPPPQILIKNTPVPANPSTTFSAAKFASFITQYSTGQVSVEIEWELQKENSKRWNPEIQYTSNYNKSVNVDFTVDTNGVYSEPRPIGTRYLTRNL

SEQ ID NO: 280 - DNA, 2211 bp, Artificial Sequence
  Description of Artificial Sequence: Synthetic polynucleotide
atggctgccgacggttatcttccagattggctcgaggacactctctctgaaggaataagacagtggtggaagctcaaacctggcccaccaccaccaaagcccgcagagcggcataaggacgacagcaggggtcttgtgcttcctgggtacaagtacctcggacccttcaacggactcgacaagggagagccggtcaacgaggcagacgccgcggccctcgagcacgacaaagcctacgaccggcagctcgacagcggagacaacccgtacctcaagtacaaccacgccgacgcggagtttcaggagcgccttaaagaagatacgtcttttgggggcaacctcgggcgggcagtcttccaggccaagaagcgggttctcgaacctctcggtctggttgaggaaggcgctaagacggctcctggaaagaaacgtccggtagagcagtcgccacaagagccagactccccctcgggcatcggcaagacaggccagcagcccgctaaaaagagactcaattttggtcagactggcgactcagagtcagtccccgatccacaacctctcggagaacctccagcaacccccgctgctgtgggacctactacaatggcttcaggcggtggcgcaccaatggcagacaataacgaaggcgccgacggagtgggtaatgcctcaggaaattggcactgcgattccacatggctgggcgacagagtcatcaccaccagcacccgcacctgggccttgcccacctacaataaccacctctacaagcaaatctccagtgcttcaacgggggccagcaacgacaaccactacttcggctacagcaccccctgggggtattttgatttcaacagattccactgccacttttcaccacgtgactggcagcgactcatcaacaacaattggggattccggcccaagagactcaacttcaaactcttcaacatccaagtcaaggaggtcacgacgaatgatggcgtcacaaccatcgctaataaccttaccagcacggttcaagtcttctcggactcggagtaccagcttccgtacgtcctcggctctgcgcaccagggccgcctccctccgttcccggcggacgtgttcatgattccgcaatacggctacctgacgctcaacaatggcagccaagccgtgggacgttcatcctcttactgcctggaatatttcccttctcagatgctgagaacgggcaacaactttaccttcagctacacctttgaggaagtgcctctccacagcagctgcgcgcacagccagagcctggaccggctgatgaatcctctcatcgaccaatacctgtattacctgaacagaactcaaaatcagtccggaagtgcccaaaacagggacttgctgttcagccgtgggtctccagctggcatgtctgttcagcccaaaaactggctacctggaccctgttatcggcagcagcgcgtttctaaaacaaaaacagacaacaacaacagcaattttacctggactggtgcttcaaaatataacctcaatgggcgtgaatccatcatcaaccctggcactgctatggcctcacacaaagacgacgaagacaagttctttcccatgagcggtgtcatgatttttggaaaagagagcgccggagcttcaaacactgcattggacaatgtcatgattacagacgaagaggaaattaaagccactaaccctgtggccaccgaaagatttgggaccgtggcagtcaatttccagagcagcagcacagaccctgcgaccggagatgtgcatgctatgggagcattacctggcatggtgtggcaagatagagacgtgtacctgcagggtcccatttgggccaaaattcctcacacagatggacactttcacccgtctcctcttatgggcggctttggactcaagaacccgcctcctcagatcctcatcaaaaacacgcctgttcctgcgaatcctccggcggagttttcagctacaaagtttgcttcattcatcacccaatactccgcaggacaagtgagtgtggaaattgaatgggagctgcagaaagaaaacagcaagcgctggaatcccgaagtgcagtacacatccaattatgcaaaatctgccaacgttgattttactgtggacaacaatggactttatactgagcctcgccccattggcacccgttaccttacccgtcccctgtaa

SEQ ID NO: 281 - protein, 736 aa, Artificial Sequence
  Description of Artificial Sequence: Synthetic polypeptide
MAADGYLPDWLEDTLSEGIRQWWKLKPGPPPPKPAERHKDDSRGLVLPGYKYLGPFNGLDKGEPVNEADAAALEHDKAYDRQLDSGDNPYLKYNHADAEFQERLKEDTSFGGNLGRAVFQAKKRVLEPLGLVEEGAKTAPGKKRPVEQSPQEPDSPSGIGKTGQQPAKKRLNFGQTGDSESVPDPQPLGEPPATPAAVGPTTMASGGGAPMADNNEGADGVGNASGNWHCDSTWLGDRVITTSTRTWALPTYNNHLYKQISSASTGASNDNHYFGYSTPWGYFDFNRFHCHFSPRDWQRLINNNWGFRPKRLNFKLFNIQVKEVTTNDGVTTIANNLTSTVQVFSDSEYQLPYVLGSAHQGRLPPFPADVFMIPQYGYLTLNNGSQAVGRSSSYCLEYFPSQMLRTGNNFTFSYTFEEVPLHSSCAHSQSLDRLMNPLIDQYLYYLNRTQNQSGSAQNRDLLFSRGSPAGMSVQPKNWLPGPCYRQQRVSKTKTDNNNSNFTWTGASKYNLNGRESIINPGTAMASHKDDEDKFFPMSGVMIFGKESAGASNTALDNVMITDEEEIKATNPVATERFGTVAVNFQSSSTDPATGDVHAMGALPGMVWQDRDVYLQGPIWAKIPHTDGHFHPSPLMGGFGLKNPPPQILIKNTPVPANPPAEFSATKFASFITQYSAGQVSVEIEWELQKENSKRWNPEVQYTSNYAKSANVDFTVDNNGLYTEPRPIGTRYLTRPL

SEQ ID NO: 282 - protein, 736 aa, Artificial Sequence
  Description of Artificial Sequence: Synthetic polypeptide
MAADGYLPDWLEDTLSEGIRQWWKLKPGPPPPKPAERHKDDSRGLVLPGYKYLGPFNGLDKGEPVNEADAAALEHDKAYDRQLDSGDNPYLKYNHADAEFQERLKEDTSFGGNLGRAVFQAKKRVLEPLGLVEEGAKTAPGKKRPVEQSPQEPDSSSGIGKTGQQPAKKRLNFGQTGDSESVPDPQPLGEPPATPAAVGPTTMASGGGAPMADNNEGADGVGNASGNWHCDSTWLGDRVITTSTRTWALPTYNNHLYKQISSASTGASNDNHYFGYSTPWGYFDFNRFHCHFSPRDWQRLINNNWGFRPKRLNFKLFNIQVKEVTTNDGVTTIANNLTSTVQVFSDSEYQLPYVLGSAHQGCLPPFPADVFMIPQYGYLTLNNGSQAVGRSSFYCLEYFPSQMLRTGNNFTFSYTFEEVPLHSSCAHSQSLDRLMNPLIDQYLYYLNRTQNQSGSAQNRDLLFSRGSPAGMSVQPKNWLPGPCYRQQRVSKTKTDNNNSNFTWTGASKYNLNGRESIINPGTAMASHKDDEDKFFPMSGVMIFGKESAGASNTALDNVMITDEEEIKATNPVATERFGTVAVNFQSSSTDPATGDVHAMGALPGMVWQDRDVYLQGPIWAKIPHTDGHFHPSPLMGGFGLKNPPPQILIKNTPVPANPPAEFSATKFASFITQYSTGQVSVEIEWELQKENSKRWNPEVQYTSNYAKSANVDFTVDNNGLYTEPRPIGTRYLTRPL

SEQ ID NO: 283 - DNA, 2208 bp, Artificial Sequence
  Description of Artificial Sequence: Synthetic polynucleotide
atggctgccgatggctatcttccagattggctcgaggacactctctctgaaggaataagacagtggtggaagctcaaacctggcccaccaccaccaaagcccgcagagcggcatagggacgacagcaggggtcttgtgcttcctgggtacaagtacctcggacccttcaacggactcgacaagggagagccggtcaacgaggcagacgccgcggccctcgagcacgacaaagcctacgaccggcagctcgacagcggagacaacccgtacctcaagtacaaccacgccgacgcggagtttcaggagcgccttaaagaagatacgtcttttgggggcaacctcggacgagcagtcttccaggcgaaaaagagggttcttgaacctctgggcctggttggggaacctgttaagacggctccgggaaaaaagaggccggtagagcactctcctgtggagccagactcctcctcgggaaccggaaaggcgggccagcagcctgcaagaaaaagattgaattttggtcagactggagacgcagactcagtacctgacccccagcctctcggacagccaccagcagccccctctggtctgggaactaatacgatggctacaggcagtggcgcaccaatggcagacaataacgagggcgccgacggagtgggtaattcctcgggaaattggcattgcgattccacatggatgggcgacagagtcatcaccaccagcacccgaacctgggccctgcccacctacaacaaccacctctacaaacaaatttccagccaatcaggagcctcgaacgacagtcactactttggctacagcaccccttgggggtattttgacttcaacagattccactgccacttttcaccacgtgactggcaaagactcatcaacaacaactggggattccgacccaagagactcaacttcaagctctttaacattcaagtcaaagaggtcacgcagaatgacggtacgacgacgattgccaataaccttaccagcacggttcaggtgtttactgactcggagtaccagctcccgtacgtcctcggctcggcgcatcaaggatgcctcccgccgttcccagcagacgtcttcatggtgccacagtatggatacctcaccctgaacaacgggagtcaggcagtaggacgctcttcattttactgcctggagtactttccttctcagatgctgcgtaccggaaacaactttaccttcagctacacttttgaggacgttcctttccacagcagctacgctcacagccagagtctggaccgtctcatgaatcctctcatcgaccagtacctgtattacttgagcacaacaaacactccaagtggaaccaccacgcagtcaaggctccagttttctcaggccggagcgagtgacattcgggaccagtctaggaactggcttcctggaccctgttaccgccagcagcgagtatcaaagacatctgcggataacaacaacagtgaatactcgtggactggagctaccaagtaccacctcaatggcagagactctctggtgaatccgggcccggccatggcaagccacaaggacaatgaagaaaagttttttcctcagagcggggttctcatctttgggaagcaaggctcagagaaaacaaatgtggacattgaaaaggtcatgattacagacgaagaggaaatcaggacaaccaatcccgtggctacggagcagtatggttctgtatctaccaacctccagagaggcaacagacaagcagctaccgcagatgtcaacacacaaggcgttcttccaggcatggtctggcaggacagagatgtgtaccttcaggggcccatctgggcaaagattccacacacggacggacattttcacccctctcccctcatgggtggattcggacttaaacaccctcctccacagattctcatcaagaacaccccggtacctgcgaatccttcgaccaccttcagtgcggcaaagtttgcttccttcatcacacagtactccacgggacaggtcagcgtggagatcgagtgggagctgcagaaggaaaacagcaaacgctggaatcccgaaattcagtacacttccaactacaacaagtctgttaatgtggactttactgtggacactaatggcgtgtattcagagcctcgccccattggcaccagatacctgactcgtaatctgtaa

SEQ ID NO: 284 - protein, 735 aa, Artificial Sequence
  Description of Artificial Sequence: Synthetic polypeptide
MAADGYLPDWLEDTLSEGIRQWWKLKPGPPPPKPAERHRDDSRGLVLPGYKYLGPFNGLDKGEPVNEADAAALEHDKAYDRQLDSGDNPYLKYNHADAEFQERLKEDTSFGGNLGRAVFQAKKRVLEPLGLVGEPVKTAPGKKRPVEHSPVEPDSSSGTGKAGQQPARKRLNFGQTGDADSVPDPQPLGQPPAAPSGLGTNTMATGSGAPMADNNEGADGVGNSSGNWHCDSTWMGDRVITTSTRTWALPTYNNHLYKQISSQSGASNDSHYFGYSTPWGYFDFNRFHCHFSPRDWQRLINNNWGFRPKRLNFKLFNIQVKEVTQNDGTTTIANNLTSTVQVFTDSEYQLPYVLGSAHQGCLPPFPADVFMVPQYGYLTLNNGSQAVGRSSFYCLEYFPSQMLRTGNNFTFSYTFEDVPFHSSYAHSQSLDRLMNPLIDQYLYYLSTTNTPSGTTTQSRLQFSQAGASDIRDQSRNWLPGPCYRQQRVSKTSADNNNSEYSWTGATKYHLNGRDSLVNPGPAMASHKDNEEKFFPQSGVLIFGKQGSEKTNVDIEKVMITDEEEIRTTNPVATEQYGSVSTNLQRGNRQAATADVNTQGVLPGMVWQDRDVYLQGPIWAKIPHTDGHFHPSPLMGGFGLKHPPPQILIKNTPVPANPSTTFSAAKFASFITQYSTGQVSVEIEWELQKENSKRWNPEIQYTSNYNKSVNVDFTVDTNGVYSEPRPIGTRYLTRNL

SEQ ID NO: 285 - protein, 737 aa, Artificial Sequence
  Description of Artificial Sequence: Synthetic polypeptide
RMAADGYLPDWLEDNLSEGIREWWDLKPGAPKPKANQQKQDDGRGLVLPGYKYLGPFNGLDKGEPVNAADAAALEHDKAYDQQLKAGDNPYLRYNHADAEFQERLQEDTSFGGNLGRAVFQAKKRVLEPLGLVEEGAKTAPGKKRPVEQSPQEPDSSSGIGKTGQQPAKKRLNFGQTGDSESVPDPQPLGEPPATPAAVGPTTMASGGGAPMADNNEGADGVGNASGNWHCDSTWLGDRVITTSTRTWALPTYNNHLYKQISSTSTGASNDNHYFGYGTPWGYFDFNRFHCHFSPRDWQRLINNNWGFRPKRLNFKLFNIQVEEVTTNDGVTTIANNLTSTVQVFSDSEYQLPYVLGSAHQGCLPPFPADVFMIPQYGYLTLNNGSQAVGRSSFYCLEYFPSQMLRTGNNFTFSYTFEEVPFHSSYAHSQSLDRLMNPLIDQYLYYLNRTQNQSGSAQNKDLLFSRGSPAGMSVQPKNWLPGPCYRQQRVSKTKTDNNNSNFTWTGASKYNLNGRESIINPGTAVASHKDDEDKFFPMSGVMIFGKESAGASSTALDNVMITDEEEIKATNPVATERFGTVAVNFQSSSTDPATGDVHAMGALPGMVWQDRDVYLQGPIWAKIPHTDGHFHPSPLMGGFGLKNPPPQILIKNTPVPANPPAEFSATKFASFITQYSTGQVSVEIEWELQKENSKRWNPEVQYTSNYAKSANVDFTVDNNGLYTEPRPIGTRYLTRPL

SEQ ID NO: 286 - protein, 736 aa, Artificial Sequence
  Description of Artificial Sequence: Synthetic polypeptide
MAADGYLPDWLEDNLSEGIREWWDLKPGAPKPKANQQKQDDGRGLVLPGYKYLGPFNGLDKGEPVNAADAAALEHDKAYDQQLKAGDNPYLRYNHADAEFQERLQEDTSFGGNLGRAVFQAKKRVLEPLGLVEEGAKTAPGKKRPVEQSPQEPDSSSGIGKTGQQPAKKRLNFGQTGDSESVPDPQPLGEPPATPAAVGPTTMASGGGAPMADNNEGADGVGNASGNWHCDSTWLGDRVITTSTRTWALPTYNNHLYKQISSTSTGASNDNHYFGYGTPWGYFDFNRFHCHFSPRDWQRLINNNWGFRPKRLNFKLFNIQVEEVTTNDGVTTIANNLTSTVQVFSDSEYQLPYVLGSAHQGCLPPFPADVFMIPQYGYLTLNNGSQAVGRSSFYCLEYFPSQMLRTGNNFTFSYTFEEVPFHSSYAHSQSLDRLMNPLIDQYLYYLNRTQNQSGSAQNKDLLFSRGSPAGMSVQPKNWLPGPCYRQQRVSKTKTDNNNSNFTWTGASKYNLNGRESIINPGTAVASHKDDEDKFFPMSGVMIFGKESAGASSTALDNVMITDEEEIKATNPVATERFGTVAVNFQSSSTDPATGDVHAMGALPGMVWQDRDVYLQGPIWAKIPHTDGHFHPSPLMGGFGLKNPPPQILIKNTPVPANPPAEFSATKFASFITQYSTGQVSVEIEWELQKENSKRWNPEVQYTSNYAKSANVDFTVDNNGLYTEPRPIGTRYLTRPL

SEQ ID NO: 287 - DNA, 2211 bp, Artificial Sequence
  Description of Artificial Sequence: Synthetic polynucleotide
atggctgccgatggttatcttccagattggctcgaggacaacctctctgagggcattcgcgagtggtgggacttgaaacctggagccccgaagcccaaagccaaccagcaaaagcaggacgacggccggggtctggtgcttcctggctacaagtacctcggacccttcaacggactcgacaagggggagcccgtcaacgcggcggacgcagcggccctcgagcacgacaaggcctacgaccagcagctcaaagcgggtgacaatccgtacctgcggtataaccacgccgacgccgagtttcaggagcgtctgcaagaagatacgtcttttgggggcaacctcgggcgagcagtcttccaggccaagaagcgggttctcgaacctctcggtctggttgaggaaggcgctaagacggctcctggaaagaaacgtccggtagagcagtcgccacaagagccagactcctcctcgggcatcggcaagacaggccagcagcccgctaaaaagagactcaattttggccagactggcgactcagagtcagtccccgatccacaacctctcggagaacctccagcaacccccgctgctgtgggacctactacaatggcttcaggcggtggcgcaccaatggcagacaataacgaaggcgccgacggagtgggtaatgcctcaggaaattggcattgcgattccacatggctgggcgacagagtcatcaccaccagcacccgcacctgggccttgcccacctacaataaccacctctacaagcaaatctccagtacttcaacgggggccagcaacgacaaccactacttcggctacggcaccccctgggggtattttgatttcaacagattccactgccacttttcaccacgtgactggcagcgactcatcaacaacaattggggattccggcccaagagactcaacttcaaactcttcaacatccaagtcgaggaggtcacgacgaatgatggcgtcacaaccatcgctaataaccttaccagcacggttcaagtcttctcggactcggagtaccagcttccgtacgtcctcggctctgcgcaccagggctgcctccctccgttcccggcggacgtgttcatgattccgcaatacggctacctgacgctcaacaatggcagccaagccgtgggacgttcatccttttactgcctggaatatttcccttctcagatgctgagaacgggcaacaactttaccttcagctacacctttgaggaagtgcctttccacagcagctacgcgcacagccagagcctggaccggctgatgaatcctctcatcgaccaatacctgtattacctgaacagaacacaaaatcagtccggaagtgcccaaaacaaggacttgctgtttagccgtgggtctccagctggcatgtctgttcagcccaaaaactggctacctggaccctgttatcggcagcagcgcgtttctaaaacaaaaacagacaacaacaacagcaattttacctggactggtgcttcaaaatataacctcaatgggcgtgaatccatcatcaaccctggcaccgctgtggcctcacacaaagacgacgaagacaagttctttcccatgagcggtgtcatgatttttggaaaagagagcgccggagcttcaagcactgcattggacaatgtcatgattacagacgaagaggaaattaaagccactaaccctgtggccaccgaaagatttgggaccgtggcagtcaatttccagagcagcagcacagaccctgcgaccggagatgtgcatgctatgggagcattacctggcatggtgtggcaagatagagacgtgtacctgcagggtcccatttgggccaaaattcctcacacagatggacactttcacccgtctcctcttatgggcggctttggactcaagaacccgcctcctcagatcctcatcaaaaacacgcctgttcctgcgaatcctccggcggagttttcagctacaaagtttgcttcattcatcacccaatactccacaggacaagtgagtgtggaaattgaatgggagctgcagaaagaaaacagcaagcgctggaatcccgaagtgcagtacacatccaattatgcaaaatctgccaacgttgattttactgtggacaacaatggactttatactgagcctcgccccattggcacccgttaccttacccgtcccctgtaa

SEQ ID NO: 288 - protein, 737 aa, Artificial Sequence
  Description of Artificial Sequence: Synthetic polypeptide
RMAADGYLPDWLEDNLSEGIREWWDLKPGAPKPKANQQKQDDGRGLVLPGYKYLGPFNGLDKGEPVNAADAAALEHDKAYDQQLKAGDNPYLRYNHADAEFQERLQEDTSFGGNLGRAVFQAKKRVLEPLGLVEEGAKTAPGKKRPVEQSPQEPDSSSGIGKTGQQPAKKRLNFGQTGDSESVPDPQPLGEPPATPAAVGPTTMASGGGAPMADNNEGADGVGNASGNWHCDSTWLGDRVITTSTRTWALPTYNNHLYKQISSTSTGASNDNHYFGYSTPWGYFDFNRFHCHFSPRDWQRLINNNWGFRPKRLNFKLFNIQVEEVTTNDGVTTIANNLTSTVQVFSDSEYQLPYVLGSAHQGCLPPFPADVFMIPQYGYLTLNNGSQAVGRSSFYCLEYFPSQMLRTGNNFTFSYTFEEVPFHSSYAHSQSLDRLMNPLIDQYLYYLNRTQNQSGSAQNKDLLFSRGSPAGMSVQPKNWLPGPCYRQQRVSKTKTDNNNSNFTWTGASKYNLNGRESIINPGTAVASHKDDEDKFFPMSGVMIFGKESAGASSTALDNVMITDEEEIKATNPVATERFGTVAVNFQSSSTDPATGDVHAMGALPGMVWQDRDVYLQGPIWAKIPHTDGHFHPSPLMGGFGLKNPPPQILIKNTPVPANPPAEFSATKFASFITQYSTGQVSVEIEWELQKENSKRWNPEVQYTSNYAKSANVDFTVDNNGLYTEPRPIGTRYLTRPL

SEQ ID NO: 289 - protein, 737 aa, Artificial Sequence
  Description of Artificial Sequence: Synthetic polypeptide
RMAADGYLPDWLEDNLSEGIREWWDLKPGAPKPKANQQKQDDGRGLVLPGYKYLGPFNGLDKGEPVNAADAAALEHDKAYDQQLKAGDNPYLRYNHADAEFQERLQEDTSFGGNLGRAVFQAKKRVLEPLGLVEEGAKTAPGKKRPVEQSPQEPDSSSGIGKTGQQPAKKRLNFGQTGDSESVPDPQPLGEPPATPAAVGPTTMASGGGAPMADNNEGADGVGNASGNWHCDSTWLGDRVITTSTRTWALPTYNNHLYKQISSTSTGASNDNHYFGYSTPWGYFDFNRFHCHFSPRDWQRLINNNWGFRPKRLNFKLFNIQVKEVTTNDGVTTIANNLTSTVQVFSDSEYQLPYVLGSAHQGCLPPFPADVFMIPQYGYLTLNNGSQAVGRSSFYCLEYFPSQMLRTGNNFTFSYTFEEVPFHSSYAHSQSLDRLMNPLIDQYLYYLNRTQNQSGSAQNKDLLFSRGSPAGMSVQPKNWLPGPCYRQQRVSKTKTDNNNSNFTWTGASKYNLNGRESIINPGTAVASHKDDEDKFFPMSGVMIFGKESAGASSTALDNVMITDEEEIKATNPVATERFGTVAVNFQSSSTDPATGDVHAMGALPGMVWQDRDVYLQGPIWAKIPHTDGHFHPSPLMGGFGLKNPPPQILIKNTPVPANPPAEFSATKFASFITQYSTGQVSVEIEWELQKENSKRWNPEVQYTSNYAKSANVDFTVDNNGLYTEPRPIGTRYLTRPL

SEQ ID NO: 290 - protein, 737 aa, Artificial Sequence
  Description of Artificial Sequence: Synthetic polypeptide
RMAADGYLPDWLEDNLSEGIREWWDLKPGAPKPKANQQKQDDGRGLVLPGYKYLGPFNGLDKGEPVNAADAAALEHDKAYDQQLKAGDNPYLRYNHADAEFQERLQEDTSFGGNLGRAVFQAKKRVLEPLGLVEEGAKTAPGKKRPVEQSPQEPDSSSGIGKTGQQPAKKRLNFGQTGDSESVPDPQPLGEPPATPAAVGPTTMASGGGAPMADNNEGADGVGNASGNWHCDSTWLGDRVITTSTRTWALPTYNNHLYKQISSTSTGASNDNHYFGYSTPWGYFDFNRFHCHFSPRDWQRLINNNWGFRPKRLNFKLFNIQVKEVTTNDGVTTIANNLTSTVQVFSDSEYQLPYVLGSAHQGCLPPFPADVFMIPQYGYLTLNNGSQAVGRSSFYCLEYFPSQMLRTGNNFTFSYTFEEVPFHSSYAHSQSLDRLMNPLIDQYLYYLNRTQNQSGSAQNKDLLFSRGSPAGMSVQPKNWLPGPCYRQQRVSKTKTDNNNSNFTWTGASKYNLNGRESIINPGTAVASHKDDEDKFFPMSGVMIFGKESAGANSTALDNVMITDEEEIKATNPVATERFGTVAVNFQSSSTDPATGDVHAMGALPGMVWQDRDVYLQGPIWAKIPHTDGHFHPSPLMGGFGLKNPPPQILIKNTPVPANPPAEFSATKFASFITQYSTGQVSVEIEWELQKENSKRWNPEVQYTSNYAKSANVDFTVDNNGLYTEPRPIGTRYLTRPL

SEQ ID NO: 291 - DNA, 2208 bp, Artificial Sequence
  Description of Artificial Sequence: Synthetic polynucleotide
atggctgccgatggttatcttccagattggctcaaggacactctctctgaaggaataagacagtggtggaagctcaaacctggcccaccaccaccaaagcccgcagagcggcataaggacgacagcgggggtcttgtgcttcctgggtacaagtacctcggacccttcaacggactcgacaagggagagccggtcaacgaggcagacgccgcggccctcgagtacgacaaggcctacgaccggcagctcgacagcggagacaacccgtacctcaagtacaaccacgccgacgcggagtttcaggagcgccttaaagaagatacgtcttttgggggcaacctcggacgagcagtcttccaggcgaaaaagagggttcttgaacctctgggcctggttgaggaacctgttaagacggctccgggaaaaaagaggccggtagagcactctcctgtggagccagactcctcctcgggaacaggaaaagcgggccagcagcctgcgagaaagagattgaattttggtcagactggagacgcagactccgtacctgacccccagcctctcggacagccaccagcagccccctctggtctgggaactaatacgatggctacaggcagtggcgcaccaatggcagacaataacgagggcgccgacggagtgggtaattcctcgggaagttggcattgcgattccacatggatgggcgacagagtcatcaccaccagcacccgaacctgggctctgcccacctacaacaaccatctgtacaagcagatctccagccaatcaggagccagcaacgacaaccactactttggctacagcaccccttgggggtattttgacttcaacagattccactgccacttttcaccacgtgactggcaaagactcatcaacaacaactggggattccggcccaagagactcaacttcaagctctttaacattcaagtcaaggaggtcacgcagaatgacggtacgacgacgattgccaataaccttaccagcacggttcaggtgtttactgactcggagtaccagctcccgtacgtccccggctcggcgcatcaaggatgcctcccgccgttcccagcagacgtcttcatggtgccacagtatggatacctcaccctgaacaacgggagtcaggcagtaggacgctcttcattttactgcctggagtactttccttctcagatgcttcgtaccggaaacaactttaccttcagctacacctttgaggatgttcctttccacagcagctacgctcacagccagagtttggaccgtctcatgaatcctctcatcgaccagtacctgtattacttgagcagaacaaacactccaagcggaaccaccacgcagtccaggcttcagttttctcaggccggagcaagtgacattcgggaccagtctaggaactggcttcctggaccctgttaccgccagcagcgagtatcaaagacagctgcggacaacaacaacagtgaatactcgtggactggagctaccaagtaccacctcaatggcagagactctctggtgaatccgggcccggccatggccagccacaaggacgatgaagaaaagttttttcctcaaagcggggttctcatctttgggaagcaaggctcagagaaaacaaatgtggacattgaaaaggtcatgattacagacgaagaggaaatcagaaccaccaatcccgtggccacggagcagtatggttctgtatctaccaacctccagagcggcaacacacaagcagctactgcagatgtcaacacacaaggcgttcttccaggcatggtctggcaggacagagacgtgcacctgcaggggcctatctgggcaaagattccacacacggacggacattttcacccctctcccctcatgggcggatttggacttaaacaccctcctccacagattctcatcaagaacaccccggtacctgcaaatccttcgaccaccttcagtgcggcaaagtttgcttccttcatcacacagtattccacagggcaggtcagcgtggagatcgagtgggagctgcagaaggagaacagcaaacgctggaaccccgagatccagtacacttccaactacaacaaatctgttaatgtggactttactgtggacactaatggtgtgtattcagagcctcgccccattggcaccagatacctgactcgtaatctgtaa

SEQ ID NO: 292 - protein, 735 aa, Artificial Sequence
  Description of Artificial Sequence: Synthetic polypeptide
MAADGYLPDWLKDTLSEGIRQWWKLKPGPPPPKPAERHKDDSGGLVLPGYKYLGPFNGLDKGEPVNEADAAALEYDKAYDRQLDSGDNPYLKYNHADAEFQERLKEDTSFGGNLGRAVFQAKKRVLEPLGLVEEPVKTAPGKKRPVEHSPVEPDSSSGTGKAGQQPARKRLNFGQTGDADSVPDPQPLGQPPAAPSGLGTNTMATGSGAPMADNNEGADGVGNSSGSWHCDSTWMGDRVITTSTRTWALPTYNNHLYKQISSQSGASNDNHYFGYSTPWGYFDFNRFHCHFSPRDWQRLINNNWGFRPKRLNFKLFNIQVKEVTQNDGTTTIANNLTSTVQVFTDSEYQLPYVPGSAHQGCLPPFPADVFMVPQYGYLTLNNGSQAVGRSSFYCLEYFPSQMLRTGNNFTFSYTFEDVPFHSSYAHSQSLDRLMNPLIDQYLYYLSRTNTPSGTTTQSRLQFSQAGASDIRDQSRNWLPGPCYRQQRVSKTAADNNNSEYSWTGATKYHLNGRDSLVNPGPAMASHKDDEEKFFPQSGVLIFGKQGSEKTNVDIEKVMITDEEEIRTTNPVATEQYGSVSTNLQSGNTQAATADVNTQGVLPGMVWQDRDVHLQGPIWAKIPHTDGHFHPSPLMGGFGLKHPPPQILIKNTPVPANPSTTFSAAKFASFITQYSTGQVSVEIEWELQKENSKRWNPEIQYTSNYNKSVNVDFTVDTNGVYSEPRPIGTRYLTRNL

SEQ ID NO: 293 - DNA, 2208 bp, Artificial Sequence
  Description of Artificial Sequence: Synthetic polynucleotide
atggctgccgatggttatcttccagattggctcgaggacactctctctgaaggaataagacagtggtggaagctcaaacctggcccaccaccaccaaagcccgcagagcggcataaggacgacagcaggggtcttgtgcttcctgggtacaagtacctcggacccttcaacggactcgacaagggggagccggtcaacgaggcagacgccgcggccctcgagcacgacaaggcctacgaccggcagctcgacagcggagacaacccgtacctcaagtacaaccacgccgacgcagagtttcaggagcgccttaaagaagatacgtcttttgggggcaacctcggacgagcagtcttccaggcgaaaaagagggttcttgaacctctgggcctggttgaggaacctgttaagacggctccgggaaaaaagaggccggtagagcactctcctgtggagccagactcctcctcgggaaccggaaaagcgggccagcagcctgcaagaaaaagattaaattttggtcagactggagacgcagactccgtacctgacccccagcctctcggacagccaccagcagccccctctggtctgggatctactacaatggctacaggcagtggcgcaccaatggcagacaataacgagggtgccgatggagtgggtaattcctcaggaaattggcattgcgattcccaatggctgggcgacagagtcatcaccaccagcacccgaacctgggccctgcccacatacaacaaccacctctacaagcaaatctccagccaatcaggagccagcaacgacaaccactactttggctacagcaccccctgggggtattttgacttcaacagattccactgccacttttcaccacgtgactggcaaagactcatcaacaacaactggggattccggcccaaaagactcaacttcaagctctttaatattcaagtcaaagaggtcacgcagaatgacggtacgacgacgattgccaataaccttaccagcacggttcaggtgtttactgactcggagtaccagctcccgtacgtcctgggctcggcgcatcaaggatgcctcccgccgtttccagcggacgtcttcatggtcccacagtatggatacctcaccctgaacaacgggagtcaggcggtaggacgctcttccttttactgcctggagtactttccttctcagatgctgcgtactggaaacaactttcagttcagctacacttttgaagacgtgcctttccacagcagctacgctcacagccagagtctggatcggctgatgaatcctctgatcgaccagtacctgtattatctgaacaagacacaaacaaatagtggaactcttcagcagtctcggctactgtttagccaagctggaccaaccaacatgtctcttcaagctaaaaactggctgcctggaccttgctacagacagcagcgtctgtcaaaacaggcaaacgacaacaacaacagcaactttccctggactgcagctacaaagtatcatctaaatggccgggactcgttggttaatccaggaccagctatggccagtcgcaaggatgacgaagaaaagtttttccccatgcatggaaccctgatatttggtaaacaaggaacaaatgccaacgacgcggatttggaaaatgtcatgattacagatgaagaagaaatcagggccaccaatcccgtggctacggagcagtacgggactgtgtcaaataatttgcaaaactcaaacactggtccaactactggaactgtcaatcaccaaggagcgttacctggtatggtgtggcaggatcgagacgtgtacctgcagggacccatttgggccaagattcctcacaccgatggacactttcatccttctccactgatgggaggttttggactcaaacacccgcctcctcagatcatgatcaaaaacactcccgttccagccaatcctcccacaaacttcagttctgccaagtttgcttctttcatcacacagtattccacgggacaggtcagcgtggagatcgagtgggagctgcagaaggagaacagcaaacgctggaatcccgaaattcagtacacttccaactacaacaagtctgttaatgtggactttactgtggacactaatggtgtgtattcagagcctcgccccattggcaccagatacctgactcgtaatctgtaa

SEQ ID NO: 294 - protein, 735 aa, Artificial Sequence
  Description of Artificial Sequence: Synthetic polypeptide
MAADGYLPDWLEDTLSEGIRQWWKLKPGPPPPKPAERHKDDSRGLVLPGYKYLGPFNGLDKGEPVNEADAAALEHDKAYDRQLDSGDNPYLKYNHADAEFQERLKEDTSFGGNLGRAVFQAKKRVLEPLGLVEEPVKTAPGKKRPVEHSPVEPDSSSGTGKAGQQPARKRLNFGQTGDADSVPDPQPLGQPPAAPSGLGSTTMATGSGAPMADNNEGADGVGNSSGNWHCDSQWLGDRVITTSTRTWALPTYNNHLYKQISSQSGASNDNHYFGYSTPWGYFDFNRFHCHFSPRDWQRLINNNWGFRPKRLNFKLFNIQVKEVTQNDGTTTIANNLTSTVQVFTDSEYQLPYVLGSAHQGCLPPFPADVFMVPQYGYLTLNNGSQAVGRSSFYCLEYFPSQMLRTGNNFQFSYTFEDVPFHSSYAHSQSLDRLMNPLIDQYLYYLNKTQTNSGTLQQSRLLFSQAGPTNMSLQAKNWLPGPCYRQQRLSKQANDNNNSNFPWTAATKYHLNGRDSLVNPGPAMASRKDDEEKFFPMHGTLIFGKQGTNANDADLENVMITDEEEIRATNPVATEQYGTVSNNLQNSNTGPTTGTVNHQGALPGMVWQDRDVYLQGPIWAKIPHTDGHFHPSPLMGGFGLKHPPPQIMIKNTPVPANPPTNFSSAKFASFITQYSTGQVSVEIEWELQKENSKRWNPEIQYTSNYNKSVNVDFTVDTNGVYSEPRPIGTRYLTRNL

SEQ ID NO: 295 - DNA, 2208 bp, Artificial Sequence
  Description of Artificial Sequence: Synthetic polynucleotide
atggctgccgatggttatcttccagattggctcgaggacactctctctgaaggaataagacagtggtggaagctcaaacctggcccaccaccaccaaagcccgcagagcggcataaggacgacagcaggggtcttgtgcttcctgggtacaagtacctcggacccttcaacggactcgacaagggagagccggtcaacgaggcagacgccgcggccctcgagcacgacaaagcctacgaccggcagctcgacagcggagacaacccgtacctcaagtacaaccacgccgacgcggagtttcaggagcgccttaaagaagatacgtcttttgggggcaacctcggacgagcagtcttccaggcgaaaaagagggttcttgaacctctgggcctggttggggaacctgtcaagacggctccaggaaaaaagaggccggtagagcactctcctgtggagccagactcctcctcgggaaccggaaaggcgggccagcagcctgcaagaaaaagattgaattttggtcagactggagacgcagactcagtacctgacccccagcctctcggacagccaccagcagccccctctggtctgggaactaatacgatggctacaggcagtggcgcaccaatggcagacaataacgagggcgccgacggagtgggtaattcctcgggaaattggcattgcgattccacatggatgggcgacagagtcatcaccaccagcacccgaacctgggccctgcccacctacaacaaccacctctacaaacaaatttccagccaatcaggagcctcgaacgacaatcactactttggctacagcaccccttgggggtattttgacttcaacagattccactgccacttttcaccacgtgactggcaaagactcatcaacaacaactggggattccgacccaagagactcaacttcaagctctttaacattcaagtcaaagaggtcacgcagaatgacggtacgacgacgattgccaataaccttaccagcacggttcaggtgtttactgactcggagtaccagctcccgtacgtcctcggctcggcgcatcaaggatgcctcccgccgttcccagcagacgtcttcatggtgccacagtatggatacctcaccctgaacaacgggagtcaggcagtaggacgctcttcattttactgcctggagtactttccttctcagatgctgcgtaccggaaacaactttaccttcagctacacttttgaggacgttcctttccacagcggctacgctcacagccagagtctggaccgtctcatgaatcctctcatcgaccagtacctgtattacttgagcacaacaaacactccaagtggaaccaccacgcagtcaaggcttcagttttctcaggccggagcgagtgacattcgggaccagtctaggaactggcttcctggaccctgttaccgccagcagcgagtatcaaagacatctgcggataacaacaacagtgaatactcgtggactggagctaccaagtaccacctcaatggcagagactctctggtgaatccgggcccggccatggcaagccacaaggacaatgaagaaaagttttttcctcagagcggggttctcatctttgggaagcaaggctcagagaaaacaaatgtggacattgaaaaggtcatgattacagacgaagaggaaatcaggacaaccaatcccgtggctacggagcagtacggttctgtatctaccaacctccagagaggcaacagacaagcagctaccgcagatgtcaacacacaaggcgttcttccaggcatggtctggcaggacagagatgtgtaccttcaggggcccatctgggcaaagattccacacacggacggacattttcacccctctcccctcatgggtggattcggacttaaacaccctcctccacagattctcatcaagaacaccccggtacctgcgaatccttcgaccaccttcagtgcggcaaagtttgcttccttcatcacacagtactccacgggacaggtcagcgtggagatcgagtgggagctgcagaaggaaaacagcaaacgctggaatcccgaaattcagtacacttccaactacaacaagtctgttaatgtggactttactgtggacactaatggcgtgtattcagagcctcgccccattggcaccagatacctgactcgtaatctgtaa

SEQ ID NO: 296 - protein, 735 aa, Artificial Sequence
  Description of Artificial Sequence: Synthetic polypeptide
MAADGYLPDWLEDTLSEGIRQWWKLKPGPPPPKPAERHKDDSRGLVLPGYKYLGPFNGLDKGEPVNEADAAALEHDKAYDRQLDSGDNPYLKYNHADAEFQERLKEDTSFGGNLGRAVFQAKKRVLEPLGLVGEPVKTAPGKKRPVEHSPVEPDSSSGTGKAGQQPARKRLNFGQTGDADSVPDPQPLGQPPAAPSGLGTNTMATGSGAPMADNNEGADGVGNSSGNWHCDSTWMGDRVITTSTRTWALPTYNNHLYKQISSQSGASNDNHYFGYSTPWGYFDFNRFHCHFSPRDWQRLINNNWGFRPKRLNFKLFNIQVKEVTQNDGTTTIANNLTSTVQVFTDSEYQLPYVLGSAHQGCLPPFPADVFMVPQYGYLTLNNGSQAVGRSSFYCLEYFPSQMLRTGNNFTFSYTFEDVPFHSGYAHSQSLDRLMNPLIDQYLYYLSTTNTPSGTTTQSRLQFSQAGASDIRDQSRNWLPGPCYRQQRVSKTSADNNNSEYSWTGATKYHLNGRDSLVNPGPAMASHKDNEEKFFPQSGVLIFGKQGSEKTNVDIEKVMITDEEEIRTTNPVATEQYGSVSTNLQRGNRQAATADVNTQGVLPGMVWQDRDVYLQGPIWAKIPHTDGHFHPSPLMGGFGLKHPPPQILIKNTPVPANPSTTFSAAKFASFITQYSTGQVSVEIEWELQKENSKRWNPEIQYTSNYNKSVNVDFTVDTNGVYSEPRPIGTRYLTRNL

SEQ ID NO: 297 - DNA, 2208 bp, Artificial Sequence
  Description of Artificial Sequence: Synthetic polynucleotide
atggctgccgatggttatcttccagattggctcgaggacactctctctgaaggaataagacagtggtggaagctcaaacctggcccaccaccaccaaagcccgcagagcggcataaggacgacagcaggggtcttgtgcttcctgggtacaagtacctcggacccttcaacggactcgacaagggagagccggtcaacgaggcagacgccgcggccctcgagcacgacaaagcctacgaccggcagctcgacagcggagacaacccgtacctcaagtacaaccacgccgacgcggagtttcaggagcgccttaaagaagatacgtcttttgggggcaacctcggacgagcagtcttccaggcgaaaaagagggttcttgaacctctgggcctggttggggaacctgttaagacggctccgggaaaaaagaggccggtagagcactctcctgtggagccagactcctcctcgggaaccggaaaggcgggccagcagcctgcaagaaaaagattgaattttggtcagactggagacgcagactcagtacctgacccccagcctctcggacagccaccagcagccccctctggtctgggaactaatacgatggctacaggcagtggcgcaccaatggcagacaataacgagggcgccgacggagtgggtaattcctcgggaaatcggcattgcgattccacatggatgggcgacagagtcatcaccaccagcacccgaacctgggccctgcccacctacaacaaccacctctacagacaaatttccagccaatcaggagcctcgaacgacaatcactactttggctacagcaccccttgggggtattttgacttcaacagattccactgccacttttcaccacgtgactggcaaagactcatcaacaacaactggggattccgacccaagagactcaacttcaagctctttaacattcaagtcaaagaggtcacgcagaatgacggtacgacgacgattgccaataaccttaccagcacggttcaggtgtttactgactcggagtaccagctcccgtacgtcctcggctcggcgcatcaaggatgcctcccgccgttcccagcagacgtcttcatggtgccacagtatggatacctcaccctgagcaacgggagtcaggcagtaggacgctcttcattttactgcccggagtactttccttctcagatgctgcgtaccggaaacaactttaccttcagctacacttttgaggacgttcctttccacagcagctacgctcacagccagagtctggaccgtctcatgaatcctctcatcgaccagtacctgtattacttgagcacaacaaacactccaagtggaaccaccacgcagtcaaggcttcagttttctcaggccggagcgagtgacattcgggaccagtctaggaactggcttcctggaccctgttaccgccagcagcgagtatcaaagacatctgcggataacaacaacagtgaatactcgtggactggagctaccaagtaccacctcaatggcagagactctctggtgaatccgggcccggccatggcaagccacaaggacaatgaagaaaagttttttcctcagagcggggttctcatctttgggaagcaaggctcagagaaaacaaatgtggacattgaaaaggtcatgattacagacgaagaggaaatcaggacaaccaatcccgtggctacggagcagtatggttctgtatctaccaacctccagagaggcaacagacaagcagctaccgcagatgtcaacacacaaggcgttcttccaggcatggtctggcaggacagagatgtgtaccttcaggggcccatctgggcaaagattccacacacggacggacattttcacccctctcccctcatgggtggattcggacctaaacaccctcctccacagattctcatcaagaacaccccggtacctgcgaatccttcgaccaccttcagtgcggcaaagtttgcttccttcatcacacagtactccacgggacaggtcagcgtggagatcgagtgggagctgcagaaggaaaacagcaaacgctggaatcccgaaattcagtacacttccaactacaacaagtctgttaatgtggactttactgtggacactaatggcgtgtattcagagcctcgccccattggcaccagatacctgactcgtaatttgtaa

SEQ ID NO: 298 - protein, 735 aa, Artificial Sequence
  Description of Artificial Sequence: Synthetic polypeptide
MAADGYLPDWLEDTLSEGIRQWWKLKPGPPPPKPAERHKDDSRGLVLPGYKYLGPFNGLDKGEPVNEADAAALEHDKAYDRQLDSGDNPYLKYNHADAEFQERLKEDTSFGGNLGRAVFQAKKRVLEPLGLVGEPVKTAPGKKRPVEHSPVEPDSSSGTGKAGQQPARKRLNFGQTGDADSVPDPQPLGQPPAAPSGLGTNTMATGSGAPMADNNEGADGVGNSSGNRHCDSTWMGDRVITTSTRTWALPTYNNHLYRQISSQSGASNDNHYFGYSTPWGYFDFNRFHCHFSPRDWQRLINNNWGFRPKRLNFKLFNIQVKEVTQNDGTTTIANNLTSTVQVFTDSEYQLPYVLGSAHQGCLPPFPADVFMVPQYGYLTLSNGSQAVGRSSFYCPEYFPSQMLRTGNNFTFSYTFEDVPFHSSYAHSQSLDRLMNPLIDQYLYYLSTTNTPSGTTTQSRLQFSQAGASDIRDQSRNWLPGPCYRQQRVSKTSADNNNSEYSWTGATKYHLNGRDSLVNPGPAMASHKDNEEKFFPQSGVLIFGKQGSEKTNVDIEKVMITDEEEIRTTNPVATEQYGSVSTNLQRGNRQAATADVNTQGVLPGMVWQDRDVYLQGPIWAKIPHTDGHFHPSPLMGGFGPKHPPPQILIKNTPVPANPSTTFSAAKFASFITQYSTGQVSVEIEWELQKENSKRWNPEIQYTSNYNKSVNVDFTVDTNGVYSEPRPIGTRYLTRNL

SEQ ID NO: 299 - DNA, 2205 bp, Artificial Sequence
  Description of Artificial Sequence: Synthetic polynucleotide
atggctgccgatggttatcttccagattggctcgaggacactctctctgaaggaataagacagtggtggaagctcaaacctggcccaccaccaccaaagcccgcagagcggcataaggacgacagcaggggtcttgtgcttcctgggtacaagtacctcggacccttcaacggactcgacaagggagagccggtcaacgaggcagacgccgcggccctcgagcacgacaaggcctacgaccggcagctcgacagcggagacaacccgtacctcaagtacaaccacgccgacgcggagtttcaggagcgtcttaaagaagatacgtcttttgggggcaacctcggacgagcagtcttccaggcgaaaaagagggttcttgaacctctgggcctggttgaggaacctgttaagacggctccgggaaaaaagaggccggtagagcactctcctgcggagccagactcctcctcgggaaccggaaaagcgggccagcagcctgcaagaaaaagactgaatttcggtcagactggagacgcagactccgtacctgacccccagcctctcagacagccaccagcagcccccacaagtttgggatctactacaatggctacaggcagtggcgcaccaatggcagacaataacgagggtgccgatggagtgggtaattcctcaggaaattggcattgcgattcccaatggctgggcgacagagtcatcaccaccagcacccgaacctgggccctgcccacctacaacaaccacctttacaagcaaatctccagccaatcaggagcctcaaacgacaaccactactttggctacagcaccccctgggggtattttgacttcaacagattccactgccacttttcaccacgtgactggcaaagactcatcaacaacaactggggattccgacccaagagactcaacttcaagctctttaacattcaagtcaaagaggtcacgcagaatgacggtacgacgacgattgccaataaccttaccagcacggttcaggtgtttactgactcggagtaccagctcccgtacgtcctcggctcggcgcatcaaggatgcctcccgccgtttccagcggacgtcttcatggtcccacagtatggatacctcaccctgaacaacgggagtcaggcggtaggacgctcttccttttactgcctggagtactttccttctcagatgctgcgtactggaaacaactttcagttcagctacacttttgaagacgtgcctttccacagcagctacgctcacagccagagtttggatcggctgatgaatcctctgatcgaccagtacctgtattatctaaacagaacacaaacagctagtggaactcagcagtctcggctactgtttagccaagctggacccacaagcatgtctcttcaagctaaaaactggctgcctggaccgtgttatcgccagcagcgtttgtcaaagcaggcaaacgacaacaacaacagcaactttccctggactggagctaccaagtactacctcaatggcagagactctttggtgaacccgggcccggccatggccagccacaaggacgatgaagaaaagtttttccccatgcatggaaccctaatatttggtaaagaaggaacaaatgctaccaacgcggaattggaaaatgtcatgattacagatgaagaggaaatcaggaccaccaatcccgtggctacagagcagtacggatatgtgtcaaataatttgcaaaactcaaatactgctgcaagtactgaaactgtgaatcaccaaggagcattacctggtatggtgtggcaggatcgagacgtgtacctgcagggacccatttgggccaagattcctcacaccgatggacactttcatccttctccactgatgggaggttttggactcaaacacccgcctcctcagattatgatcaaaaacactcccgttccagccaatcctcccacaaacttcagttctgccaagtttgcttccttcatcacacagtattccacgggacaggtcagcgtggagatcgagtgggagctgcagaaggagaacagcaaacgctggaatcccgaaattcagtacacttccaactacaacaaatctgttaatgtggactttactgtggacactaatggtgtgtattcagagcctcgccccattggcaccagatacctgactcgtaatctgtaa

SEQ ID NO: 300 - protein, 734 aa, Artificial Sequence
  Description of Artificial Sequence: Synthetic polypeptide
MAADGYLPDWLEDTLSEGIRQWWKLKPGPPPPKPAERHKDDSRGLVLPGYKYLGPFNGLDKGEPVNEADAAALEHDKAYDRQLDSGDNPYLKYNHADAEFQERLKEDTSFGGNLGRAVFQAKKRVLEPLGLVEEPVKTAPGKKRPVEHSPAEPDSSSGTGKAGQQPARKRLNFGQTGDADSVPDPQPLRQPPAAPTSLGSTTMATGSGAPMADNNEGADGVGNSSGNWHCDSQWLGDRVITTSTRTWALPTYNNHLYKQISSQSGASNDNHYFGYSTPWGYFDFNRFHCHFSPRDWQRLINNNWGFRPKRLNFKLFNIQVKEVTQNDGTTTIANNLTSTVQVFTDSEYQLPYVLGSAHQGCLPPFPADVFMVPQYGYLTLNNGSQAVGRSSFYCLEYFPSQMLRTGNNFQFSYTFEDVPFHSSYAHSQSLDRLMNPLIDQYLYYLNRTQTASGTQQSRLLFSQAGPTSMSLQAKNWLPGPCYRQQRLSKQANDNNNSNFPWTGATKYYLNGRDSLVNPGPAMASHKDDEEKFFPMHGTLIFGKEGTNATNAELENVMITDEEEIRTTNPVATEQYGYVSNNLQNSNTAASTETVNHQGALPGMVWQDRDVYLQGPIWAKIPHTDGHFHPSPLMGGFGLKHPPPQIMIKNTPVPANPPTNFSSAKFASFITQYSTGQVSVEIEWELQKENSKRWNPEIQYTSNYNKSVNVDFTVDTNGVYSEPRPIGTRYLTRNL

SEQ ID NO: 301 - DNA, 3160 bp, Artificial Sequence
  Description of Artificial Sequence: Synthetic polynucleotide
acccttcactaaagggactagtcctgcaggtttaaacgaattcgcccttgctgcgtcaactggaccaatgagaactttcccttcaacgactgtgtcgacaagatggtgatttggtgggaggaggggaagatgaccgccaaggtcgtggagtcggccaaagccattctcggaggaagcaaggtgcgcgtggaccagaaatgcaagtcctcggcccagatagatccgactcccgtgatcgtcacctccaacaccaacatgtgcgccgtgattgacgggaactcaacgaccttcgaacaccagcagccgttgcaagaccggatgttcaaatttgaactcacccgccgtctggatcatgactttgggaaggtcaccaagcgggaagtcaaagactttttccggtgggcaaaggatcacgtggttgaggtggagcatgaattctacgtcaaaaagggtggagccaagaaaagacccgcccctagtgacgcagatataagtgagcccaaacgggtgcgcgagtcagttgcgcagccatcgacgtcagacgcggaagcttcgatcaactacgcggacaggtaccaaaacaaatgttctcgtcacgtgggcatgaatctgatgctgtttccctgcagacaatgcgagagaatgaatcaaaattcaaatatctgcttcactcacggacagaaagactgtttagagtgctttcccgtgtcagaatctcaacctgtttctgtcgtcaaaaaggcgtatcagaaactgtgctacattcatcatatcatgggaaaggtgccagacgcttgcactgcctgcgatctggtcaatgtggatttggatgactgcatctctgaacaataaatgatttaaatcaggtatggctgccgatggttatcttccagattggctcgaggacactctctctgaaggaataagacagtggtggaagctcaaacctggcccaccaccaccaaagcccgcagagcggcataaggacgacagcaggggtcttgtgcttcctgggtacaagtacctcggacccttcaacggactcgacaagggagagccggtcaacgaggcagacgccgcggccctcgagcacgacaaggcctacgaccggcagctcgacagcggagacaacccgtacctcaagtacaaccacgccgacgcggagtttcaggagcgtcttaaagaagatacgtcttttgggggcaacctcggacgagcagtcttccaggcgaaaaagagggttcttgaacctctgggcctggttgaggaacctgttaagacggctccgggaaaaaagaggccggtagagcactctcctgcggagccagactcctcctcgggaaccggaaaagcgggccagcagcctgcaagaaaaagactgaatttcggtcagactggagacgcagactccgtacctgacccccagcctctcagacagccaccagcagcccccacaagtttgggatctactacaatggctacaggcagtggcgcaccaatggcagacaataacgagggtgccgatggagtgggtaattcctcaggaaattggcattgcgattcccaatggctgggcgacagagtcatcaccaccagcacccgaacctgggccctgcccacctacaacaaccacctttacaagcaaatctccagccaatcaggagcctcaaacgacaaccactactttggctacagcaccccctgggggtattttgacttcaacagattccactgccacttttcaccacgtgactggcaaagactcatcaacaacaactggggattccgacccaagagactcaacttcaagctctttaacattcaagtcaaagaggtcacgcagaatgacggtacgacgacgattgccaataaccttaccagcacggttcaggtgtttactgactcggagtaccagctcccgtacgtcctcggctcggcgcatcaaggatgcctcccgccgtttccagcggacgtcttcatggtcccacagtatggatacctcaccctgaacaacgggagtcaggcggtaggacgctcttccttttactgcctggagtactttccttctcagatgctgcgtactggaaacaactttcagttcagctacacttttgaagacgtgcctttccacagcagctacgctcacagccagagtttggatcggctgatgaatcctctgatcgaccagtacctgtattatctaaacagaacacaaacagctagtggaactcagcagtctcggctactgtttagccaagctggacccacaagcatgtctcttcaagctaaaaactggctgcctggaccgtgttatcgccagcagcgtttgtcaaagcaggcaaacgacaacaacaacagcaactttccctggactggagctaccaagtactacctcaatggcagagactctttggtgaacccgggcccggccatggccagccacaaggacgatgaagaaaagtttttccccatgcatggaaccctaatatttggtaaagaaggaacaaatgctaccaacgcggaattggaaaatgtcatgattacagatgaagaggaaatcaggaccaccaatcccgtggctacagagcagtacggatatgtgtcaaataatttgcaaaactcaaatactgctgcaagtactgaaactgtgaatcaccaaggagcattacctggtatggtgtggcaggatcgagacgtgtacctgcagggacccatttgggccaagattcctcacaccgatggacactttcatccttctccactgatgggaggttttggactcaaacacccgcctcctcagattatgatcaaaaacactcccgttccagccaatcctcccacaaacttcagttctgccaagtttgcttccttcatcacacagtattccacgggacaggtcagcgtggagatcgagtgggagctgcagaaggagaacagcaaacgctggaatcccgaaattcagtacacttccaactacaacaaatctgttaatgtggactttactgtggacactaatggtgtgtattcagagcctcgccccattggcaccagatacctgactcgtaatctgtaattgcttgttaatcaataaaccgtttaattcgtttcagttgaactttggtctctgcgaagggcgaattcgcggccgctaaatcaatcg

SEQ ID NO: 302 - protein, 734 aa, Artificial Sequence
  Description of Artificial Sequence: Synthetic polypeptide
MAADGYLPDWLEDTLSEGIRQWWKLKPGPPPPKPAERHKDDSRGLVLPGYKYLGPFNGLDKGEPVNEADAAALEHDKAYDRQLDSGDNPYLKYNHADAEFQERLKEDTSFGGNLGRAVFQAKKRVLEPLGLVEEPVKTAPGKKRPVEHSPAEPDSSSGTGKAGQQPARKRLNFGQTGDADSVPDPQPLGQPPAAPTSLGSTTMATGSGAPMADNNEGADGVGNSSGNWHCDSQWLGDRVITTSTRTWALPTYNNHLYKQISSQSGASNDNHYFGYSTPWGYFDFNRFHCRFSPRDWQRLINNNWGFRPKRLNFKLFNIQVKEVTQNDGTTTIANNLTSTVQVFTDSEYQLPYVLGSAHQGCLPPFPADVFMVPQYGYLTLNNGSQAVGRSSFYCLEYFPSQMLRTGNNFQFSYTFEDVPFHSSYAHSQGLDRLMNPLIDQYLYYLNRTQTASGTQQSRLLFSQAGPTSMSLQAKNWLPGPCYRQQRLSKQANDNNNSNFPWTGATKYHLNGGDSLVNPGPAMASHKDDEEKFFPMHGTLIFGKEGTNATNAELENVMITDEEEIRTTNPVATEQYGYVSNNLQNSNTAASTETVNHQGALPGMVWQDRDVYLRGPIWAKIPHADGHFHPSPLMGGFGLKHPPPQIMIKNTPVPANPPTNFSSAKFASFITQYSTGQVSVEIEWELQKENSKRWNPEIQYTSNYNKSVNVDFTVDTNGVYSEPRPIGTRYLTRNL

SEQ ID NO: 303 - DNA, 3157 bp, Artificial Sequence
  Description of Artificial Sequence: Synthetic polynucleotide
ctcactaagggactagtcctgcaggtttaaacgaattcgcccttgctgcgtcaactggaccaatgagaactttcccttcaacgactgtgtcgacaagatggtgatttggtgggaggaggggaagatgaccgccaaggtcgtggagtcggccaaagccactctcggaggaagcaaggtgcgcgtggaccagaaacgcaagtcctcggcccagatagatccgactcccgtgatcgtcacctccaacaccaacatgtgcgccgtgattgacgggaactcaacgaccttcgaacaccagcagccgttgcaagaccgaatgttcaaatttgaactcacccgccgtctggatcatgacttcgggaaggtcaccaagcaggaagtcaaagactttttccggtgggcaaaggatcacgtggttgaggtggagcatgaattctacgtcaaaaagggtggagccaagaaaagacccgcccctagtgacgcagatataagtgagcccaaacgggtgcgcgagtcagttgcgcagccatcgacgtcagacgcggaagcttcgatcaactacgcggacaggtaccaaaacaaatgttctcgtcacgtgggcatgaatctgatgctgtttccctgcagacaatgcgagagaatgaatcaaaattcaaatatctgcttcactcacggacagaaagactgtttagagtgctttcccgtgtcagaatctcaacctgtttctgtcgtcaaaaaggcgtatcagaaactgtgctacattcatcatatcatgggaaaggtgccagacgcttgcactgcctgcgatctggtcaatgtggatttggatgactgcatctctgaacaataaatgatttaaatcaggtatggctgccgatggttatcttccagattggctcgaggacactctctctgaaggaataagacagtggtggaagctcaaacctggcccaccaccaccaaagcccgcagagcggcataaggacgacagcaggggtcttgtgcttcctgggtacaagtacctcggacccttcaacggactcgacaagggagagccggtcaacgaggcagacgccgcggctctcgagcacgacaaggcctacgaccggcagctcgacagcggagacaacccgtacctcaagtacaaccacgccgacgcggagtttcaggagcgtcttaaagaagatacgtcttttgggggcaacctcggacgagcagtcttccaggcgaaaaagagggttcttgaacctctgggcctggttgaggaacctgttaagacggctccgggaaaaaagaggccggtagagcactctcctgcggagccagactcctcctcgggaaccggaaaagcgggccagcagcctgcaagaaaaagactgaatttcggtcagactggagacgcagactccgtacctgacccccagcctctcggacagccaccagcagcccccacaagtttgggatctactacaatggctacaggcagtggcgcaccaatggcagacaataacgagggtgccgatggagtgggtaattcctcaggaaattggcattgcgattcccaatggctgggcgacagagtcatcaccaccagcacccgaacctgggccctgcccacctacaacaaccacctttacaagcaaatctccagccaatcaggagcctcaaacgacaaccactactttggctacagcaccccctgggggtattttgacttcaacagattccactgccgcttttcaccacgtgactggcaaagactcatcaacaacaactggggattccgacccaagagactcaacttcaagctctttaacattcaagtcaaagaggtcacgcagaatgacggtacgacgacgattgccaataaccttaccagcacggttcaggtgtttactgactcggagtaccagctcccgtacgtcctcggctcggcgcatcaaggatgcctcccgccgtttccagcggacgtcttcatggtcccacagtatggatacctcaccctgaacaacgggagtcaggcggtaggacgctcttccttttactgcctggagtactttccttctcagatgctgcgtactggaaacaactttcagttcagctacacttttgaagacgtgcctttccacagcagctacgctcacagccagggtttggatcggctgatgaatcctctgatcgaccagtacctgtattatctaaacagaacacaaacagctagtggaactcagcagtctcggctactgtttagccaagctggacccacaagcatgtctcttcaagctaaaaactggctgcctggaccgtgttatcgccagcagcgtttgtcaaagcaggcaaacgacaacaacaacagcaactttccctggactggagctaccaagtaccacctcaatggcggagactctttggtgaacccgggcccggccatggccagccacaaggacgatgaagaaaagtttttccccatgcatggaaccctaatatttggtaaagaaggaacaaatgctaccaacgcggaattggaaaatgtcatgattacagatgaagaggaaatcaggaccaccaatcccgtggctacagagcagtacggatatgtgtcaaataatttgcaaaactcaaatactgctgcaagtactgaaactgtgaatcaccaaggagcattacctggtatggtgtggcaggatcgagacgtgtacctgcggggacccatttgggccaagattcctcacgccgatggacactttcatccttctccactgatgggaggttttggactcaaacacccgcctcctcagattatgatcaaaaacactcccgttccagccaatcctcccacaaacttcagttctgccaagtttgcttccttcatcacacagtattccacgggacaggtcagcgtggagatcgagtgggagctgcagaaggagaacagcaaacgctggaatcccgaaattcagtacacttccaactacaacaaatctgttaatgtggactttactgtggacactaatggtgtgtattcagagcctcgccccattggcaccagatacctgactcgtaatctgtaattgcttgttaatcaataaaccgtttaattcgtttcagttgaactttggtctctgcgaagggcgaattcgcggccgctaaattcaattcg

SEQ ID NO: 304 - protein, 734 aa, Artificial Sequence
  Description of Artificial Sequence: Synthetic polypeptide
MAADGYLPDWLEDTLSEGIRQWWKLKPGPPPPKPAERHKDDSRGLVLPGYKYLGPFNGLDKGEPVNEADAAALEHDKAYDRQLDSGDNPYLKYNHADAEFQERLKEDTSFGGNLGRAVFQAKKRVLEPLGLVEEPVKTAPGKKRPVEHSPAEPDSSSGTGKAGQQPARKRLNFGQTGDADSVPDPQPLGQPPAAPTSLGSTTMATGSGAPMADNNEGADGVGNSSGNWHCDSQWLGDRVITTSTRTWALPTYNNHLYKQISSQSGASNDNHYFGYSTPWGYFDFNRFHCHFSPRDWQRLINNNWGFRPKRLNFKLFNIQVKEVTQNDGTTTIANNLTSTVQVFTDSEYQLPYVLGSAHQGCLPPFPADVFMVPQYGYLTLNNGSQAVGRSSFYCLECFPSQMLRTGNNFQFSYTFEDVPFHSSYAHSQSLDRLMNPLIDQYLYYLNRTQTASGTQQSRLLFSQAGPTSMSLQAKNWLPGPCYRQQRLSKQANDNNNSNFPWTGATKYHLNGRDSLVNPGPAMASHKDDEEKFFPMHGTLIFGKEGTNATNAELENVMITDEEEIRTTNPVATEQYGYVSNNLQNSNTAASTETVNHQGALPGMVWQDRDVYLQGPIWAKIPHTDGHFHPSPLMGGFGLKHPPPQIMIKNTPVPANPPTNFSSAKFASFITQYSTGQVSVEIEWELQKENSKRWNPEIQYTSNYNKSVNVDFTVDTNGVYSEPRPIGTRYLTRNL

SEQ ID NO: 305 - DNA, 2208 bp, Artificial Sequence
  Description of Artificial Sequence: Synthetic polynucleotide
atggctgccgatggttatcttccagattggctcgaggacactctctctgaaggaataagacagtggtggaagctcaaacctggcccaccaccaccaaagcccgcagagcggcataaggacgacagcaggggtcttgtgcttcctggatacaagtacctcggacccttcaacggactcgacaagggagagccggtcaacgaggcagacgccgcggccctcgagcacgacaaggcctacgaccggcagctcgacagcggagacaacccgtacctcaagtacaaccacgccgacgcggagtttcaggagcgccttaaagaagatacgtcttttgggggcaacctcggacgagcagtcttccaggcgaaaaagagggttcttgaacctctgggcctggttgaggaacctgttaagacggctccgggaaaaaagaggccggtagagcactctcctgtggagccagactcctcctcgggaaccggaaaagcgggcaaccagcctgcaagaaaaagattgaatttcggtcagactggagacgcagactccgtacctgacccccagcctctcggacagccaccagcatccccctctggtctgggaactaatacgatggctacaggcagtggcgcaccaatggcagacaataacgagggcgccgacggagtgggtaattcctcgggaaattggcattgcgattccacatggatgggcgacagagtcgtcaccaccagcacccgcacctgggccctgcccacctacaacaaccacctctacaagcagatttccagccaatcaggagccagcaacgacaaccactactttggctacagcaccccttgggggtattttgacttcaacagattccactgccacttttcgccacgcgactggcagagactcatcaacaacaactggggattccggcccaaaagactcaacttcaagctgtttaacattcaagtcaaggaggtcacgcagaatgacggtacgacgacgattgccaataaccttaccagcacggttcaggtgtttactgacttggagtaccagctcccgtacgtcctcggctcggcgcatcaaggatgcctcccgccgttcccagcagacgtcttcatggtgccacagtatggatacctcaccctgaacaacgggagtcaggcggtaggacgctcttccttttactgcctggagtactttccttctcagatgcttcgcaccggaaacaactttaccttcagctacacttttgaagacgttcctttccacagcagctacgctcacagtcaaagtctggaccgtctcatgaatcctctcatcgaccagtacctgtattacttgagcagaacaaacactccaagcggaaccactacgcagtccaggcttcagttttctcaggccggagcgagtgacattcgggaccagtctaggaactggcttcctggaccctgttaccgccagcagcgagtatcaaagacagctgcggataacaacaacagtgaatactcgtggactggagctaccaagtaccacctcaatggcagagactctctggtgaatccgggcccggccatggccagccacaaggacgatgaagaaaagttttttcctcaaagcggggttctcatctttgggaagcaaggctcagagaaaacaaatgtggacattgaaaaggtcatgattacagacgaagaggaaatcaggaccaccaatcccgtggctacggagcagtatggttctgtatctaccaacctccagagcggcaacacacaagcagctacctcagatgtcaacacacaaggcgttcttccaggcatggtctggcaggacagagacgtgtacctgcaggggcccatctgggcaaaaattccacacacggacggacattttcacccctctcccctcatgggcggatttggacttaaacaccctcctccacagattctcattaagaataccccggtacctgcgaatccttcgaccaccttcagcgcggcaaagtttgcttccttcatcacacagtattccacggggcaggtcagcgtggagatcgagtgggagctgcagaaggagaacagcaaacgctggaatcccgaaattcagtacacttccaactacaacaaatctgttaatgtggactttactgtggacactaatggggtgtattcagagcctcgccctattggcaccagatacctgactcgtaatctgtaa

SEQ ID NO: 306 - DNA, 3159 bp, Artificial Sequence
  Description of Artificial Sequence: Synthetic polynucleotide
gattgatttagcggccgcgaattcgcccttgctgcgtcaactggaccaatgagaactttcccttcaacgattgcgtcgacaagatggtgatctggtgggaggagggaaagatgaccgccaaggtcgtggagtcggccaaagccattctcggaggaagcaaggtgcgtgtggaccaaaagtgcaagtcttcggcccagatcgacccgactcccgtgatcgtcacctccaacaccaacatgtgcgccgtgattgatggaaactcaacgaccttcgagcaccagcagccgttgcaagaccggatgttcaaatttgaacttacccgccgtctggatcatgactttggaaaggtcaccaagcaggaagtgaaagactttttccggtgggcaaaggatcacgtggttgaggtggagcatgagttctacgtcaaaaagggtggagccaaaaaaagacccgcccccagtgacgcagatataagtgagcccaaacgggcgcgcgagtcagttgcgcagccatcgacgtcagacgcggaagcttcgatcaactacgcggacaggtaccaaaacaaatgttctcgtcacgtgggcatgaatctgatgctgtttccctgcagacaatgcgagagaatgaatcagaattcaaatatctgcttcactcacggacagaaagactgtccatagtgctttcccgtgtcagaatctcaacccgtttctgtcgtcaaaaaggcgtatcagaaactgtgctacattcatcacatcatgggaaaggtgccagacgcttgcactgcttgcgacctggtcaatgtggatttggatgactgcatctctgaacaataaatgatttaaatcaggtatggctgccgatggttatcttccagattggctcgaggacactctctctgaaggaataagacagtggtggaagctcaaacctggcccaccaccaccaaagcccgcagagcggcataaggacgacagcaggggtcttgtgcttcctggatacaagtacctcggacccttcaacggactcgacaagggagagccggtcaacgaggcagacgccgcggccctcgagcacgacaaggcctacgaccggcagctcgacagcggagacaacccgtacctcaagtacaaccacgccgacgcggagtttcaggagcgccttaaagaagatacgtcttttgggggcaacctcggacgagcagtcttccaggcgaaaaagagggttcttgaacctctgggcctggttgaggaacctgttaagacggctccgggaaaaaagaggccggtagagcactctcctgtggagccagactcctcctcgggaaccggaaaagcgggcaaccagcctgcaagaaaaagattgaatttcggtcagactggagacgcagactccgtacctgacccccagcctctcggacagccaccagcatccccctctggtctgggaactaatacgatggctacaggcagtggcgcaccaatggcagacaataacgagggcgccgacggagtgggtaattcctcgggaaattggcattgcgattccacatggatgggcgacagagtcgtcaccaccagcacccgcacctgggccctgcccacctacaacaaccacctctacaagcagatttccagccaatcaggagccagcaacgacaaccactactttggctacagcaccccttgggggtattttgacttcaacagattccactgccacttttcgccacgcgactggcagagactcatcaacaacaactggggattccggcccaaaagactcaacttcaagctgtttaacattcaagtcaaggaggtcacgcagaatgacggtacgacgacgattgccaataaccttaccagcacggttcaggtgtttactgacttggagtaccagctcccgtacgtcctcggctcggcgcatcaaggatgcctcccgccgttcccagcagacgtcttcatggtgccacagtatggatacctcaccctgaacaacgggagtcaggcggtaggacgctcttccttttactgcctggagtactttccttctcagatgcttcgcaccggaaacaactttaccttcagctacacttttgaagacgttcctttccacagcagctacgctcacagtcaaagtctggaccgtctcatgaatcctctcatcgaccagtacctgtattacttgagcagaacaaacactccaagcggaaccactacgcagtccaggcttcagttttctcaggccggagcgagtgacattcgggaccagtctaggaactggcttcctggaccctgttaccgccagcagcgagtatcaaagacagctgcggataacaacaacagtgaatactcgtggactggagctaccaagtaccacctcaatggcagagactctctggtgaatccgggcccggccatggccagccacaaggacgatgaagaaaagttttttcctcaaagcggggttctcatctttgggaagcaaggctcagagaaaacaaatgtggacattgaaaaggtcatgattacagacgaagaggaaatcaggaccaccaatcccgtggctacggagcagtatggttctgtatctaccaacctccagagcggcaacacacaagcagctacctcagatgtcaacacacaaggcgttcttccaggcatggtctggcaggacagagacgtgtacctgcaggggcccatctgggcaaaaattccacacacggacggacattttcacccctctcccctcatgggcggatttggacttaaacaccctcctccacagattctcattaagaataccccggtacctgcgaatccttcgaccaccttcagcgcggcaaagtttgcttccttcatcacacagtattccacggggcaggtcagcgtggagatcgagtgggagctgcagaaggagaacagcaaacgctggaatcccgaaattcagtacacttccaactacaacaaatctgttaatgtggactttactgtggacactaatggggtgtattcagagcctcgccctattggcaccagatacctgactcgtaatctgtaattgcttgttaatcaataaaccgtttaattcgtttcagttgaactttggtctctgcgaagggcgaattcgtttaaacctgcaggactagtccctttagtgagg

SEQ ID NO: 307 - protein, 735 aa, Artificial Sequence
  Description of Artificial Sequence: Synthetic polypeptide
MAADGYLPDWLEDTLSEGIRQWWKLKPGPPPPKPAERHKDDSRGLVLPGYKYLGPFNGLDKGEPVNEADAAALEHDKAYDRQLDSGDNPYLKYNHADAEFQERLKEDTSFGGNLGRAVFQAKKRVLEPLGLVEEPVKTAPGKKRPVEHSPVEPDSSSGTGKAGNQPARKRLNFGQTGDADSVPDPQPLGQPPASPSGLGTNTMATGSGAPMADNNEGADGVGNSSGNWHCDSTWMGDRVVTTSTRTWALPTYNNHLYKQISSQSGASNDNHYFGYSTPWGYFDFNRFHCHFSPRDWQRLINNNWGFRPKRLNFKLFNIQVKEVTQNDGTTTIANNLTSTVQVFTDLEYQLPYVLGSAHQGCLPPFPADVFMVPQYGYLTLNNGSQAVGRSSFYCLEYFPSQMLRTGNNFTFSYTFEDVPFHSSYAHSQSLDRLMNPLIDQYLYYLSRTNTPSGTTTQSRLQFSQAGASDIRDQSRNWLPGPCYRQQRVSKTAADNNNSEYSWTGATKYHLNGRDSLVNPGPAMASHKDDEEKFFPQSGVLIFGKQGSEKTNVDIEKVMITDEEEIRTTNPVATEQYGSVSTNLQSGNTQAATSDVNTQGVLPGMVWQDRDVYLQGPIWAKIPHTDGHFHPSPLMGGFGLKHPPPQILIKNTPVPANPSTTFSAAKFASFITQYSTGQVSVEIEWELQKENSKRWNPEIQYTSNYNKSVNVDFTVDTNGVYSEPRPIGTRYLTRNL

SEQ ID NO: 308 - DNA, 2205 bp, Artificial Sequence
  Description of Artificial Sequence: Synthetic polynucleotide
atggctgccgatggttatcttccagattggctcgaggacactctctctgaaggaataagacagtggtggaagctcaaacctggcccaccaccaaagcccgcagagcggcataaggacgacagcaggggtcttgtgcttcctggatacaagtacctcggacccttcaacggactcgacaagggagagccggtcaacgaggcagacgccgcggccctcgagcacgacaaggcctacgaccggcagctcgacagcggagacaacccgtacctcaagtacaaccacgccgacgcggagtttcaggagcgccttaaagaagatacgtcttttgggggcaacctcggacgagcagtcttccaggcgaaaaagagggttcttgaacctctgggcctggttgaggaacctgttaagacggctccgggaaaaaagaggcccgtagagcactctcctgtggagccagactcctcctcgggaaccggaaaagcgggcaaccagcctgcaagaaaaagattgaatttcggtcagactggagacgcagactccgtacctgacccccagcctctcggacagccaccagcagccccctctggtctgggaactaatacgatggctacaggcagtggcgcaccaatggcagacaataacgagggcgccgacggagtgggtaattcctcgggagattggcattgcgattccacatggatgggcgacagagtcatcaccaccagcacccgcacctgggccctgcccacctacaacaaccacctctacaagcagatttccagccaatcaggagccagcaatgacaaccactactttggctacagcaccccttgggggtattttgacttcaacagattccactgccacttttcgccacgcgactggcagagactcatcaacaacaactggggattccggcccaaaagactcaacctcaagctgtttaacattcaagtcaaggaggtcacgcagaatgacggtacgacgacgattgccaataaccttaccagcacggttcaggtgtttactgacttggagtaccagctcccgtacgtcctcggctcggcgcatcaaggatgcctcccgccgttcccagcagacgtcttcatggtgccacagtatggatacctcaccctgaacaacgggagtcaggcggtaggacgctcttccttttactgcctggagtactttccttctcagatgcttcgtaccggaaacaactttaccttcagctacacttttgaagacgttcctttccacagcagctacgctcacagtcaaagtctggaccgtctcatgaatcctctcatcgaccagtacctgtattacttgagcagaacaaacactccaagcggaaccactacgcagtccaggcttcagttttctcaggccggagcgagtgacattcgggaccagtctaggaactggcttcctggaccctgttaccgccagcagcgagtatcaaagacagctgcggataacaacaacggtgaatactcgtggactggagctaccaagtaccacctcaatggcagagactctctggtgaatccgggcccggccatggccagccacaaggacgatgaagaaaagttttttcctcaaagcggggttctcatctttgggaagcaaggctcagagaaaacaaatgtggacattgaaaaggtcatgattacagacgaagaggaaatcaggaccaccaatcccgtggctacggagcagtatggttctgtatctaccaacctccagagcggcaacacacgagcagctacctcagatgtcaacacacaaggcgttcttccaggcatggtctggcaggacagagacgtgtacctgcaggggcccatctgggcaaaaattccacacacggacggacattttcacccctctcccctcatgggcggatttggacttaaacaccctcctccacagattctcattaagaataccccggtacctgcgaatccttcgaccaccttcagcgcggcaaagtttgcttccttcatcacacagtattccacggggcaggtcagcgtggagatcgagtgggagctgcagaaggagaacagcaaacgctggaatcccgaaattcagtacacttccaactacaacaaatctgttaatgtggactttactgtggacactaatggggtgtattcagagcctcgccctattggcaccagatacctgactcgtaatctgtaa

SEQ ID NO: 309 - DNA, 3156 bp, Artificial Sequence
  Description of Artificial Sequence: Synthetic polynucleotide
cgattgaatttagcggccgcgaattcgcccttgctgcgtcaacggaccaatgagaactttcccttcaacgattgcgtcgacaagatggtgatctggtgggaggagggaaagatgaccgccaaggtcgtggagtcggccaaagccattctcggaggaagcaaggtgcgtgtggaccaaaagtgcaagtcttcggcccagatcgacccgactcccgtgatcgtcacctccaacaccaacatgtgcgccgtgattgatggaaactcaacgaccttcgagcaccagcagccgttgcaagaccggatgttcaaatttgaacttacccgccgtctggatcatgactttggaaaggtcaccaagcaggaagtgaaagactttttccggtgggcaaaggatcacgtggttgaggtggagcatgagttctacgtcaaaaagggtggagccaaaaaaagacccgcccccagtgacgcagatataagtgagcccaaacgggcgcgcgagtcagttgcgcagccatcgacgtcagacgcggaagcttcgatcaactacgcggacaggtaccaaaacaaatgttctcgtcacgtgggcatgaatctgatgctgtttccctgcagacaatgcgagcgaatgaatcagaattcaaatatctgcttcactcacggacagaaagactgtttagagtgctttcccgtgtcagaatctcaacccgtttctgtcgtcaaaaaggcgtatcagaaactgtgctacattcatcacatcatgggaaaggtgccagacgcttgcactgcttgcgacctggtcaatgtggatttggatgactgcatctctgaacaataaatgatttaaatcaggtatggctgccgatggttatcttccagattggctcgaggacactctctctgaaggaataagacagtggtggaagctcaaacctggcccaccaccaaagcccgcagagcggcataaggacgacagcaggggtcttgtgcttcctggatacaagtacctcggacccttcaacggactcgacaagggagagccggtcaacgaggcagacgccgcggccctcgagcacgacaaggcctacgaccggcagctcgacagcggagacaacccgtacctcaagtacaaccacgccgacgcggagtttcaggagcgccttaaagaagatacgtcttttgggggcaacctcggacgagcagtcttccaggcgaaaaagagggttcttgaacctctgggcctggttgaggaacctgttaagacggctccgggaaaaaagaggcccgtagagcactctcctgtggagccagactcctcctcgggaaccggaaaagcgggcaaccagcctgcaagaaaaagattgaatttcggtcagactggagacgcagactccgtacctgacccccagcctctcggacagccaccagcagccccctctggtctgggaactaatacgatggctacaggcagtggcgcaccaatggcagacaataacgagggcgccgacggagtgggtaattcctcgggagattggcattgcgattccacatggatgggcgacagagtcatcaccaccagcacccgcacctgggccctgcccacctacaacaaccacctctacaagcagatttccagccaatcaggagccagcaatgacaaccactactttggctacagcaccccttgggggtattttgacttcaacagattccactgccacttttcgccacgcgactggcagagactcatcaacaacaactggggattccggcccaaaagactcaacctcaagctgtttaacattcaagtcaaggaggtcacgcagaatgacggtacgacgacgattgccaataaccttaccagcacggttcaggtgtttactgacttggagtaccagctcccgtacgtcctcggctcggcgcatcaaggatgcctcccgccgttcccagcagacgtcttcatggtgccacagtatggatacctcaccctgaacaacgggagtcaggcggtaggacgctcttccttttactgcctggagtactttccttctcagatgcttcgtaccggaaacaactttaccttcagctacacttttgaagacgttcctttccacagcagctacgctcacagtcaaagtctggaccgtctcatgaatcctctcatcgaccagtacctgtattacttgagcagaacaaacactccaagcggaaccactacgcagtccaggcttcagttttctcaggccggagcgagtgacattcgggaccagtctaggaactggcttcctggaccctgttaccgccagcagcgagtatcaaagacagctgcggataacaacaacggtgaatactcgtggactggagctaccaagtaccacctcaatggcagagactctctggtgaatccgggcccggccatggccagccacaaggacgatgaagaaaagttttttcctcaaagcggggttctcatctttgggaagcaaggctcagagaaaacaaatgtggacattgaaaaggtcatgattacagacgaagaggaaatcaggaccaccaatcccgtggctacggagcagtatggttctgtatctaccaacctccagagcggcaacacacgagcagctacctcagatgtcaacacacaaggcgttcttccaggcatggtctggcaggacagagacgtgtacctgcaggggcccatctgggcaaaaattccacacacggacggacattttcacccctctcccctcatgggcggatttggacttaaacaccctcctccacagattctcattaagaataccccggtacctgcgaatccttcgaccaccttcagcgcggcaaagtttgcttccttcatcacacagtattccacggggcaggtcagcgtggagatcgagtgggagctgcagaaggagaacagcaaacgctggaatcccgaaattcagtacacttccaactacaacaaatctgttaatgtggactttactgtggacactaatggggtgtattcagagcctcgccctattggcaccagatacctgactcgtaatctgtaattgcttgttaatcaataaaccgtttaattcgtttcagttgaactttggtctctgcgaagggcgaattcgtttaaacctgcaggactagtccctttagtgag

SEQ ID NO: 310 - protein, 734 aa, Artificial Sequence
  Description of Artificial Sequence: Synthetic polypeptide
MAADGYLPDWLEDTLSEGIRQWWKLKPGPPPKPAERHKDDSRGLVLPGYKYLGPFNGLDKGEPVNEADAAALEHDKAYDRQLDSGDNPYLKYNHADAEFQERLKEDTSFGGNLGRAVFQAKKRVLEPLGLVEEPVKTAPGKKRPVEHSPVEPDSSSGTGKAGNQPARKRLNFGQTGDADSVPDPQPLGQPPAAPSGLGTNTMATGSGAPMADNNEGADGVGNSSGDWHCDSTWMGDRVITTSTRTWALPTYNNHLYKQISSQSGASNDNHYFGYSTPWGYFDFNRFHCHFSPRDWQRLINNNWGFRPKRLNLKLFNIQVKEVTQNDGTTTIANNLTSTVQVFTDLEYQLPYVLGSAHQGCLPPFPADVFMVPQYGYLTLNNGSQAVGRSSFYCLEYFPSQMLRTGNNFTFSYTFEDVPFHSSYAHSQSLDRLMNPLIDQYLYYLSRTNTPSGTTTQSRLQFSQAGASDIRDQSRNWLPGPCYRQQRVSKTAADNNNGEYSWTGATKYHLNGRDSLVNPGPAMASHKDDEEKFFPQSGVLIFGKQGSEKTNVDIEKVMITDEEEIRTTNPVATEQYGSVSTNLQSGNTRAATSDVNTQGVLPGMVWQDRDVYLQGPIWAKIPHTDGHFHPSPLMGGFGLKHPPPQILIKNTPVPANPSTTFSAAKFASFITQYSTGQVSVEIEWELQKENSKRWNPEIQYTSNYNKSVNVDFTVDTNGVYSEPRPIGTRYLTRNL

SEQ ID NO: 311 - DNA, 2208 bp, Artificial Sequence
  Description of Artificial Sequence: Synthetic polynucleotide
atggctgccgatggttatcttccagattggctcgaggacactctctctgaaggaataagacagtggtggaagctcaaacctggcccaccaccaccaaagcccgcagagcggcataaggacgacagcaggggtcttgtgcttcctgggtacaagtacctcggacccttcaacggactcgacaagggagagccggtcaacgaggcagacgccgcggccctcgagcacgacaaggcctacgaccggcagctcgacagcggagacaacccgtacctcaagtacgaccacgccgacgcggagtttcaggagcgccttaaagaagatacgtcttttgggggcaacctcggacgagcagtcttccaggcaaaaaagagggttcttgaacctctgggcctggttgaggagcctgttaagacggctccgggaaaaaagaggccggtagagcactctcctgtggagccagactcctcctcgggaaccggaaaagcgggcaaccagcctgcaagaaagagattgaatttcggtcagactggagacgcagactccgtacctgacccccagcctctcggacagccaccagcagccccctctggtctgggaactaatacgatggctacaggcagtggcgcaccaatggcagacaataacgatggcgccgacggagtgggtaattcctcgggaaattggcattgcgattccacatggatgggcgacagagtcatcaccaccagcacccgaacctgggctctgcccacctacaacaaccatctgtacaagcagatttccagccaatcaggagccagcaacgacaaccactactttggctacagcaccccttgggggtattttgacttcaacagattccactgccacttttcaccacgtgactggcaaagactcatcaacaacaactggggattccggcccaagagactcaacttcaagctctttaacattcaagtcagagaggtcacgcagaatgatggtacgacgacgattgccaataaccttaccagcacggttcaggtgtttactgactcggagtaccagctcccgtacgtcctcggctcggcgcatcaaggatgcctcccgccgttcccagcagacgtcttcatggtgccacagtatggatacctcaccctgaacaacgggagtcaggcagtaggacgctcttcattttactgcctggagtacttcccttctcagatgctgcgtaccggaaacaactttaccttcagctacacctttgaggatgttcctttccacagcagctacgctcacagccagagtttggaccgtctcatgaatcctctcatcgaccagtacctgtattacttgagcagaacaaacactccaagcggaaccaccacgcagtccaggcttcagttttctcaggccggagcgagtgacattcgggatcagtctaggaactggcttcctggaccctgttaccgccagcagcgagtatcaaagacatctgcggacaacaacaacagtgaatactcgtggattggagctaccaagtaccacctcaatggcagagactctctggtgaatccgggcccggcaatggccagccacaaggacgatgaagaaaagttttttcctcagagcggggttctcatctttggaaaacaaggatcagagaaaacaaatgtggacattgaaaaggtcatgattacagacgaagaggaaatcagaaccaccaatcccgtggccacggagcagtatggttctgtatctaccaacctccagagcggcaacacacaagcatctactgcagatgtcaacacacaaggcgttcttccaggcatggtctggcaggacagagacgtgtacctgcaggggcctatctgggcaaagattccgcacacggacggacattttcacccctctcccctcatgggcggattcggacttaaacaccctcctccacagattctcatcaaaaacaccccggtacctgcgaatccttcgaccaccttcagtgcggcaaagtttgcttccttcatcacacagtattccacggggcgggtcagcgtggagatcgagtgggagctacagaaggagaacagcaaacgctggaatcccgagatccagtacacttccaactacaacaaatctgttaatgtggactttactgtggacactaatggtgtgtattcagagcctcgccccattggcaccagatacctgactcgtaatctgtaa

SEQ ID NO: 312 - protein, 735 aa, Artificial Sequence
  Description of Artificial Sequence: Synthetic polypeptide
MAADGYLPDWLEDTLSEGIRQWWKLKPGPPPPKPAERHKDDSRGLVLPGYKYLGPFNGLDKGEPVNEADAAALEHDKAYDRQLDSGDNPYLKYDHADAEFQERLKEDTSFGGNLGRAVFQAKKRVLEPLGLVEEPVKTAPGKKRPVEHSPVEPDSSSGTGKAGNQPARKRLNFGQTGDADSVPDPQPLGQPPAAPSGLGTNTMATGSGAPMADNNDGADGVGNSSGNWHCDSTWMGDRVITTSTRTWALPTYNNHLYKQISSQSGASNDNHYFGYSTPWGYFDFNRFHCHFSPRDWQRLINNNWGFRPKRLNFKLFNIQVREVTQNDGTTTIANNLTSTVQVFTDSEYQLPYVLGSAHQGCLPPFPADVFMVPQYGYLTLNNGSQAVGRSSFYCLEYFPSQMLRTGNNFTFSYTFEDVPFHSSYAHSQSLDRLMNPLIDQYLYYLSRTNTPSGTTTQSRLQFSQAGASDIRDQSRNWLPGPCYRQQRVSKTSADNNNSEYSWIGATKYHLNGRDSLVNPGPAMASHKDDEEKFFPQSGVLIFGKQGSEKTNVDIEKVMITDEEEIRTTNPVATEQYGSVSTNLQSGNTQASTADVNTQGVLPGMVWQDRDVYLQGPIWAKIPHTDGHFHPSPLMGGFGLKHPPPQILIKNTPVPANPSTTFSAAKFASFITQYSTGRVSVEIEWELQKENSKRWNPEIQYTSNYNKSVNVDFTVDTNGVYSEPRPIGTRYLTRNL

SEQ ID NO: 313 - DNA, 2217 bp, Artificial Sequence
  Description of Artificial Sequence: Synthetic polynucleotide
atggctgccgatggttatcttccagattggctcgaggacaacctctctgagggcattcgcgagtggtgggacttgaaacctggagccccgaaacccaaagccaaccagcaaaagcaggacgacggccggggtctggtgcttcctggctacaagtacctcggacccttcaacggactcgacaagggggagcccgtcaacgcggcggacgcagcggccctcgagcacgacaaggcctacgaccagcagctcaaagcgggtgacaatccgtacctgcggtataaccacgccgacgccgagtttcaggagcgtctgcaagaagatacgtcttttgggggcaacctcgggcgagcagtcttccaggccaagaagcgggttctcgaacctctcggtctggttgaggaaggcgctaagacggctcctggaaagaagagaccggtagagccatcaccccagcgttctccagactcctctacgggcatcggcaagacaggccagcagcccgcgaaaaagagactcaactttgggcagactggcgactcagagtcagtgcccgaccctcaaccaatcggagaaccccccgcaggcccctctggtctgggatctggtacaatggctgcaggcggtggcgctccaatggcagacaataacgaaggcgccgacggagtgggtagttcctcaggaaattggcattgcgattccgcatggctgggcgacagagtcatcaccaccagcacccgaccctgggccctccccacctacaacaaccacctctacaagcaaatctccaacgggacatcgggaggaagcaccaacgacaacacctacttcggctacagcaccccctgggggtattttgactttaacagattccactgccacttctcaccacgtgactggcagcgactcatcaacaacaactggggattccggcccaagagactcaacttcaagctcttcaacatccaggtcaaggaggtcacgcagaatgaaggcaccaagaccatcgccaataaccttaccagcacgattcaggtctttacggactcggaataccagctcccgtacgtcctcggctctgcgcaccagggctgcccgcctccgttcccggcggacgtcttcatgattcctcagtacgggtacctgactctgaacaacggcagtcaggccgtgggccgttcctccttctactgcctggagtactttccttctcaaatgcggagaacgggcaacaactttgagttcagctaccagtttgaggacgtgccttttcacagcagctacgcgcatagccaaagcctggaccggctgatgaaccccctcatcgaccagtacctgtactacctgtctcggactcagtccacgggaggtaccgcaggaactcagcagttgctattttctcaggccgggcctaataacatgtcggctcaggccaaaaactggctacccgggccctgctaccggcagcaacgcgtctccacgacactgtcgcaaaataacaacagcaactttgcttggaccggtgccaccaagtatcatctgaatggcagagactctctggtaaatcccggtgtcgctatggcaacgcacaaggacgacgaagagcgattttttccatccagcggagtcttgatgtttgggaaacagggagctggaaaagacaacgtggactatagcagcgttatgctaaccagtgaggaagaaatcaaaaccaccaacccagtggccacagaacagtacggcgtggtggccgataacctgcaacagcaaaacgccgctcctattgtaggggccgtcaacagtcaaggagccttacctggcatggtctggcagaaccgggacgtgtacctgcagggtcctatctgggccaagattcctcacacggacggcaactttcatccttcgccgctgatgggaggctttggactgaaacacccgcctcctcagatcctgattaagaatacacctgttcccgcggatcctccaactaccttcagtcaagccaagctggcgtcgttcatcacgcagtacagcaccggacaggtcagcgtggaaattgaatgggagctgcagaaagagaacagcaagcgctggaacccagagattcagtatacttccaactactacaaatctacaaatgtggactttgctgtcaatactgagggtacttattcagagcctcgccccattggcacccgttacctcacccgtaacctgtaa

SEQ ID NO: 314 - protein, 738 aa, Artificial Sequence
  Description of Artificial Sequence: Synthetic polypeptide
MAADGYLPDWLEDNLSEGIREWWDLKPGAPKPKANQQKQDDGRGLVLPGYKYLGPFNGLDKGEPVNAADAAALEHDKAYDQQLKAGDNPYLRYNHADAEFQERLQEDTSFGGNLGRAVFQAKKRVLEPLGLVEEGAKTAPGKKRPVEPSPQRSPDSSTGIGKTGQQPAKKRLNFGQTGDSESVPDPQPIGEPPAGPSGLGSGTMAAGGGAPMADNNEGADGVGSSSGNWHCDSAWLGDRVITTSTRPWALPTYNNHLYKQISNGTSGGSTNDNTYFGYSTPWGYFDFNRFHCHFSPRDWQRLINNNWGFRPKRLNFKLFNIQVKEVTQNEGTKTIANNLTSTIQVFTDSEYQLPYVLGSAHQGCPPPFPADVFMIPQYGYLTLNNGSQAVGRSSFYCLEYFPSQMRRTGNNFEFSYQFEDVPFHSSYAHSQSLDRLMNPLIDQYLYYLSRTQSTGGTAGTQQLLFSQAGPNNMSAQAKNWLPGPCYRQQRVSTTLSQNNNSNFAWTGATKYHLNGRDSLVNPGVAMATHKDDEERFFPSSGVLMFGKQGAGKDNVDYSSVMLTSEEEIKTTNPVATEQYGVVADNLQQQNAAPIVGAVNSQGALPGMVWQNRDVYLQGPIWAKIPHTDGNFHPSPLMGGFGLKHPPPQILIKNTPVPADPPTTFSQAKLASFITQYSTGQVSVEIEWELQKENSKRWNPEIQYTSNYYKSTNVDFAVNTEGTYSEPRPIGTRYLTRNL

SEQ ID NO: 315 - protein, 735 aa, Artificial Sequence
  Description of Artificial Sequence: Synthetic polypeptide
MAADGYLPDWLEDTLSEGIRQWWKLKPGPPPPKPAERHKDDSRGLVLPGYKYLGPFNGLDKGEPVNEADAAALEHDKAYDRQLDSGDNPYLKYNHADAEFQERLKEDTSFGGNLGRAVFQAKKRVLEPLGLVEEPVKTAPGKKRPVEHSPVEPDSSSGTGKAGQQPARKRLNFGQTGDADSVPDPQPLGQPPAAPSGLGSTTMATGSGAPMADNNEGADGVGNSSGNWHCDSQWLGDRVITTSTRTWALPTYNNHLYKQISSQSGASNDNHYFGYSTPWGYFDFNRFHCHFSPRDWQRLINNNWGFRPKRLNFKLFNIQVKEVTQNDGTTTIANNLTSTVQVFTDSEYQLPYVLGSAHQGCLPPFPADVFMVPQYGYLTLNNGSQAVGRSSFYCLEYFPSQMLRTGNNFQFSYTFEDVPFHSSYAHSQSLDRLMNPLVDQYLYYLNKTQTNSGTLQQSRLLFSQAGPTNMSLQAKNWLPGPCYRQQRLSKQANDNNNSNFPWTAATKYHLNGRDSLVNPGPAMASHKDDEEKFFPMHGTLIFGKQGTNANDADLENVMITDEEEIRTTNPVATEQYGTVSNNLQNSNTGPTTGTVNHQGALPGMVWQDRDVYLQGPIWAKIPHTDGHFHPSPLMGGFGLKHPPPQIMIKNTPVPANPPTNFSSAKFASFITQYSTGQVSVEIEWELQKENSKRWNPEIQYTSNYNKSVNVDFTVDTNGVYSEPRPIGTRYLTRNL

SEQ ID NO: 316 - DNA, 3158 bp, Artificial Sequence
  Description of Artificial Sequence: Synthetic polynucleotide
gattgaatttagcggccgcgaattcgcccttgctgcgtcaactggaccaatgagaactttcctttcaatgattgcgtcgacaagatggtgatctggtgggaggagggaaagatgaccgccaaggtcgtggagtcggccaaagccattctcggaggaagcaaggtgcgcgcggaccagaaatgcaagtcctcggcccagatagacccgactcccgtgattgtcacctccaacaccaacatgtgcgccgtgattgacgggaactcaacgaccttcgaacaccagcagccgttgcaagaccggatgttcaaatttgaactcacccgccgtctggatcatgactttgggaaggtcaccaagcaggaagtcaaagactttttccggtgggcaaaggatcacgtggttgaggtggagcatgaattctacgtcaaaaagggtggagctaagaaaagacccgcccccagtgacgcagatataagtgagcccaaacgggcgcgcgagtcagttgcgcagccatcgacgtcagacgcggaagcttcgatcaactacgcgggcaggtaccaaaacaaatgttctcgtcacgtgggcatgaatctgatgctgtttccctgcagacaatgcgagagaatgaatcagaattcaaatatctgcttcactcacggacagaaagactgtttagagtgctttcccgtgtcagaatctcaacccgtttctgtcgtcaaaaaggcgtatcagaaactttgctacattcatcatatcatgggaaaggtgccagacgcttgcactgcctgcgatctggtcaatgtggatttggatgactgcatctctgaacaataaatgatttaaatcaggtatggctgccgatggttatcttccagattggctcgaggacactctctctgaaggaataagacagtggtggaagctcaaacctggcccaccaccaccaaagcccgcagagcggcataaggacgacagcaggggtcttgtgcttcctgggtacaagtacctcggacccttcaacggactcgacaagggggagccggtcaacgaggcagacgccgcggccctcgagcacgacaaggcctacgaccggcagctcgacagcggagacaacccgtacctcaagtacaaccacgccgacgcggagtttcaggagcgccttaaagaagatacgtcttttgggggcaacctcggacgagcagtcttccaggcaaaaaagagggttcttgaacctctgggcctggttgaggaacctgttaaaacggctccgggaaaaaagaggccggtagagcactctcctgtggagccagactcctcctcgggaaccggaaaagcgggccagcagcctgcaagaaaaagattgaatttcggtcagactggagacgcagactccgtacctgacccccagcctctcggacagccaccagcagccccctctggtctgggatctactacaatggctacaggcagtggcgcaccaatggcagacaataacgagggtgccgatggagtgggtaattcctcgggaaattggcattgcgattcccaatggctgggcgacagagtcatcaccaccagcacccgcacctgggccctgcccacctacaacaaccacctctacaagcaaatctccagccaatcaggagcctcaaacgacaaccactactttggctacagcaccccctgggggtattttgacttcaacagattccactgccacttttcaccacgtgactggcaaagactcatcaacaacaactggggattccgacccaagagactcaacttcaagctctttaacattcaagtcaaagaggtcacgcagaatgacggtacgacgacgattgccaataaccttaccagcacggttcaggtgtttactgactcggagtaccagctcccgtacgtcctcggctcggcgcatcaaggatgcctcccgccgtttccagcggacgtcttcatggtcccacagtatggatacctcaccctgaacaacgggagtcaggcagtaggacgctcttcattttactgcctggagtactttccttctcagatgctgcgtaccggaaacaactttcaattcagctacacttttgaagacgtgcctttccacagcagctacgctcacagccagagtctggatcggctgatgaatcctctggtcgaccagtacctgtattatctgaacaagacacaaacaaatagtggaactcttcagcagtctcggctactgtttagccaagctggacccaccaacatgtctcttcaagctaaaaactggctgcctggaccttgctacagacagcagcgtctgtcaaagcaggcaaacgacaacaacaacagcaactttccctggactgcagctacaaagtatcatctaaatggccgggactcgttggttaatccaggaccagctatggccagtcacaaggatgacgaagaaaagtttttccccatgcatggaacccttatatttggtaaacaaggaacaaatgccaacgacgcggatttggaaaatgtcatgattacagatgaagaagaaatcaggaccaccaatcccgtggctacggagcagtacggaactgtatcaaataatttgcaaaactcaaacactggtccaactactggaactgtcaatcaccaaggagcgttacctggtatggtgtggcaggatcgagacgtgtacctgcagggacccatttgggccaagattcctcacaccgatggacactttcatccttctccactgatgggaggttttggactcaaacacccacctcctcaaatcatgatcaaaaacactcccgttccagccaatcctcccacaaacttcagttctgccaagtttgcttctttcatcacacagtattccacggggcaggtcagcgtggagatcgagtgggagctgcagaaggagaacagcaaacgctggaatcccgaaattcagtacacttccaactacaacaaatctgttaatgtggactttactgtggacactaatggtgtgtattcagagcctcgccccattggcaccagatacctgactcgtaatctgtaattgcttgttaatcaataaaccgtttaattcgtttcagttgaactttggtctctgcgaagggcgaattcgtttaaacctgcaggactagtccctttagtga

SEQ ID NO: 317 - protein, 735 aa, Artificial Sequence
  Description of Artificial Sequence: Synthetic polypeptide
MAADGYLPDWLEDTLSEGIRQWWKLKPGPPPPKPAERHKDDSRGLVLPGYKYLGPFNGLDKGEPVNEADAAALEHDKAYDRQLDSGDNPYLKYNHADAEFQERLKEDTSFGGNLGRAVFQAKKRVLEPLGLVEEPVKTAPGKKRPVEHPPVEPDSSSGTGKAGQQPARKRLNFGQTGDADSVPDPQPLGQPPAAPSGLGSTTMATGSGAPMADNNEGADGVGNSSGNWHCDSQWLGDRVITTSTRTWALPTYNNHLYKQISSQSGASNDNHYFGYSTPWGYFDFNRFHCHFSPRDWQRLINNNWGFRPKRLNFKLFNIQVKEVTQNDGTTTIANNLTSTVQVFTDSEYQLPYVLGSAHQGCLPPFPADVFMVPQYGYLTLNNGSQAVGRSSFYCLEYFPSQMLRTGNNFQFSYTFEDVPFHSSYAHSQSLDRLMNPLIDQYLYYLNKTQTNSGTLQQSRLLFSQAGPTNMSLQAKNRLPGPCYRQQRLSKQANDNNNSNFPWTAATKYHLNGRDSLVNPGPAMASHKDDEEKFFPMHGTLIFGKQGTNANDADLENVMITDEEEIRTTNPVATEQYGTVSNNLQNSNTGPTTGTVNHQGALPGMVWQDRDVYLQGPIWAKIPHTDGHFHPSPLVGGFGLKHPPPQIMIKNTPVPANPPTNFSSAKFASFITQYSTGQVSVEIEWELQKENSKRWNPEIQYTSNYNKSVNVDFTVDTNGVYSEPRPIGTRYLTRNL

SEQ ID NO: 318 - DNA, 3159 bp, Artificial Sequence
  Description of Artificial Sequence: Synthetic polynucleotide
gattgaatttagcggccgcgaattcgcccttgctgcgtcaactggaccaatgagaactttcctttcaatgattgcgtcgacaagatggtgatctggtgggaggagggaaagatgaccgccaaggtcgtggagtcggccaaagccattctcggaggaagcaaggtgcgcgtggaccagaaatgcaagtcctcggcccagatagacccgactcccgtgattgtcacctccaacaccgacatgtgcgccgtgattgacgggaactcaacgaccttcgaacaccagcagccgttgcaagaccggatgttcaaatttgaactcacccgccgtctggatcatgactttgggaaggtcaccaagcaggaagtcaaagactttttccggtgggcaaaggatcacgtggttgaggtggagcatgaattctacgtcaaaaagggtggagctaagaaaagacccgcccccagtgacgcagatataagtgagcccaaacgggcgcgcgagtcagttgcgcagccatcgacgtcagacgcggaagcttcgatcaactacgcggacaggtaccaaaacaaatgttctcgtcacgtgggcatgaatctgatgctgtttccctgcagacaatgcgagagaatgaatcagaattcaaatatctgcttcactcacggacagaaagactgtttagagtgctttcccgtgtcagaatctcaacccgtttctgtcgtcaaaaaggcgtatcagaaactttgctacattcatcatatcatgggaaaggtgccagacgcttgcactgcctgcgatctggtcaatgtggatttggatgactgcatctctgaacaataaatgatttaaatcaggtatggctgccgatggttatcttccagattggctcgaggacactctctctgaaggaataagacagtggtggaagctcaaacctggcccaccaccaccaaagcccgcagagcggcataaggacgacagcaggggtcttgtgcttcctgggtacaagtacctcggacccttcaacggactcgacaagggggagccggtcaacgaggcagacgccgcggccctcgagcacgacaaggcctacgaccggcagctcgacagcggagacaacccgtacctcaagtacaaccacgccgacgcggagtttcaggagcgccttaaagaagatacgtcttttgggggcaacctcggacgagcagtcttccaggcaaaaaagagggttcttgaacctctgggcctggttgaggaacctgttaaaacggctccgggaaaaaagaggccggtagagcaccctcctgtggagccagactcctcctcgggaaccggaaaagcgggccagcagcctgcaagaaaaagattgaatttcggtcagactggagacgcagactccgtacctgacccccagcctctcggacagccaccagcagccccctctggtctgggatctactacaatggctacaggcagtggcgcaccaatggcagacaataacgagggtgccgatggagtgggtaattcctcgggaaattggcattgcgattcccaatggctgggcgacagagtcatcaccaccagcacccgcacctgggccctgcccacctacaacaaccacctctacaagcaaatctccagccaatcaggagcctcaaacgacaaccactactttggctacagcaccccctgggggtattttgacttcaacagattccactgccacttttcaccacgtgactggcaaagactcatcaacaacaactggggattccgacccaagagactcaacttcaagctctttaacattcaagtcaaagaggtcacgcagaatgacggtacgacgacgattgccaataaccttaccagcacggttcaggtgtttactgactcggagtaccagctcccgtacgtcctcggctcggcgcatcaaggatgcctcccgccgtttccagcggacgtcttcatggtcccacagtatggatacctcaccctgaacaacgggagtcaggcagtaggacgctcttcattttactgcctggagtactttccttctcagatgctgcgtaccggaaacaactttcagttcagctacacttttgaagacgtgcctttccacagcagctacgctcacagccagagtctggatcggctgatgaatcctctgatcgaccagtacctgtattatctgaacaagacacaaacaaatagtggaactcttcagcagtctcggctactgtttagccaagctggacccaccaacatgtctcttcaagctaaaaaccggctgcctggaccttgctacagacagcagcgtctgtcaaagcaggcaaacgacaacaacaacagcaactttccctggaccgcagctacaaagtatcatctaaatggccgggactcgttggttaatccaggaccagctatggccagtcacaaggatgacgaagaaaagtttttccccatgcatggaacccttatatttggtaaacaaggaacaaatgccaacgacgcggatttggaaaatgtcatgattacagatgaagaagaaatcaggaccaccaatcccgtggctacggagcagtacggaactgtatcaaataatttgcaaaactcaaacactggtccaactactggaactgtcaatcaccaaggagcgttacctggtatggtgtggcaggatcgagacgtgtacctgcagggacccatttgggccaagattcctcacaccgatggacactttcatccttctccactggtgggaggttttggactcaaacacccacctcctcaaatcatgatcaaaaacactcccgttccagccaatcctcccacaaacttcagttctgccaagtttgcttctttcatcacacagtattccacggggcaggtcagcgtggagatcgagtgggagctgcagaaggagaacagcaaacgctggaatcccgaaattcagtacacttccaactacaacaaatctgttaatgtggactttactgtggacactaatggtgtgtattcagagcctcgccccattggcaccagatacctgactcgtaatctgtaattgcttgttaatcaataaaccgtttaattcgtttcagttgaactttggtctctgcgaagggcgaattcgtttaaacctgcaggactagtccctttagtgag

SEQ ID NO: 319 - DNA, 2208 bp, Artificial Sequence
  Description of Artificial Sequence: Synthetic polynucleotide
atggctgccgatggttatcttccagattggctcgaggacactctctctgaaggaataagacagtggtggaagctcaaacctggcccaccaccaccaaagcccgcagagcggcataaggacgacagcaggggtcttgtgcttcctgggtacaagtaccttggacccttcaacggactcgacaagggagagccggtcaacgaggcagacgccgcggccctcgagcacgacaaggcctacgaccggcagctcgacagcggagacaacccgtaccccaagtacaaccacgccgacgcggagttccaggagcgtcttaaagaagatacgtcttttgggggcaacctcggacgagcagtcttccaggcgaaaaagagggttcttgaacctctgggcctggttgaggaacctgttaagacggctccgggaaaaaagaggccggtagagcactctcctgcggagccagactcctcctcgggaaccggaaaagcgggccagcagcctgcaagaaagagattgaatttcggtcagactggagacgcagactccgtacctgacccccagcctctcggacagccaccagcagccccctctggtctgggaactaatacgatggctacaggcagtggcgcaccaatggcagacaataacgagggcgccgacggagtgggtaattcctcgggaaattggcattgcgattccacatggatgggcgacagagtcatcaccaccagcacccgcacctgggctctgcccacctacaacaaccacctctacaagcagatttccagccaatcaggagcctcaaacgacaaccactactttggctacagcaccccttgggggtattttgacttcaacagattccactgccacttttcgccacgtgactggcaaagactcatcaacaacaattggggattccggcccaaaagactcaacttcaagctctttaacattcaagtcaaggaggtcacgcagaatgacggtacgacgacgattgccaataaccttaccagcacggttcaggtgtttactgactcggagtaccagctcccgtacgtcctcggctcggcgcatcaaggatgcctcccgccgttcccagcagacgtcttcatggtgccacagtatggatacctcaccctgaacaacgggagtcaggcagtaggacgctcttcattttactgcctggagtactttccttctcagatgctgcgtaccggaaacaactttaccttcagctacacctttgaggacgttcctttccacagcagctacgcccacagccagagtttggaccgtctcatgaatcctctcatcgaccagtacctgtattacttgagcagaacaaacactccaagcggaaccaccacgcagtcaaggcttcagttttctcaggccggagcaagtgacattcgggaccagtctaggaactggcttcctggaccctgttaccgccagcagcgagtatcaaagacatctgcggataacaacaacagtgaatactcgtggactggagctaccaagtaccaccttaatggaagagactctctggtgaatccgggcccggccatggccagccacaaggacgatgaagaaaagttttttcctcagagcggggttctcatctttggaaaacaagactcgggaaaaactaatgtggacattgaaaaggtcatgattacagacgaagaggaaatcaggaccaccaatcccgtggctacggagcagtatggttctgtatctaccaacctccagagcggcaacacacaagcagctacctcagatgtcaacacacaaggcgttcttccaggcatggtgtggcaggacagagacgtgtacctgcaggggcccatctgggcaaagattccacacacggacggacattttcacccctctcccctcatgggcggattcggacttaaacaccctcccccgcagattctcatcaagaacaccccggtacctgcgaatccttcgactaccttcagtgcggcaaagtttgcttccttcattacacagtactccacggggcaggtcagcgtggagatcgagtgggagctgcagaaggagaacagcaaacgctggaatcccgagattcagtacacttccaactacaacaaatctgttaatgtggactttactgtggacactaatggtgtgtattcagagcctcgccccattggcaccaggtacctgactcgtaatctgtaa

SEQ ID NO: 320 - protein, 735 aa, Artificial Sequence
  Description of Artificial Sequence: Synthetic polypeptide
MAADGYLPDWLEDTLSEGIRQWWKLKPGPPPPKPAERHKDDSRGLVLPGYKYLGPFNGLDKGEPVNEADAAALEHDKAYDRQLDSGDNPYPKYNHADAEFQERLKEDTSFGGNLGRAVFQAKKRVLEPLGLVEEPVKTAPGKKRPVEHSPAEPDSSSGTGKAGQQPARKRLNFGQTGDADSVPDPQPLGQPPAAPSGLGTNTMATGSGAPMADNNEGADGVGNSSGNWHCDSTWMGDRVITTSTRTWALPTYNNHLYKQISSQSGASNDNHYFGYSTPWGYFDFNRFHCHFSPRDWQRLINNNWGFRPKRLNFKLFNIQVKEVTQNDGTTTIANNLTSTVQVFTDSEYQLPYVLGSAHQGCLPPFPADVFMVPQYGYLTLNNGSQAVGRSSFYCLEYFPSQMLRTGNNFTFSYTFEDVPFHSSYAHSQSLDRLMNPLIDQYLYYLSRTNTPSGTTTQSRLQFSQAGASDIRDQSRNWLPGPCYRQQRVSKTSADNNNSEYSWTGATKYHLNGRDSLVNPGPAMASHKDDEEKFFPQSGVLIFGKQDSGKTNVDIEKVMITDEEEIRTTNPVATEQYGSVSTNLQSGNTQAATSDVNTQGVLPGMVWQDRDVYLQGPIWAKIPHTDGHFHPSPLMGGFGLKHPPPQILIKNTPVPANPSTTFSAAKFASFITQYSTGQVSVEIEWELQKENSKRWNPEIQYTSNYNKSVNVDFTVDTNGVYSEPRPIGTRYLTRNL

SEQ ID NO: 321 - DNA, 2208 bp, Artificial Sequence
  Description of Artificial Sequence: Synthetic polynucleotide
atggctgccgatggttatcttccagattggctcgaggacactctctctgaaggaataagacagtggtggaagctcaaacctggcccaccaccaccaaagcccgcagagcggcataaggacgacagcaggggtcttgtgcttcctgggtacaagtaccttggacccttcaacggactcgacaagggagagccggtcaacgaggcagacgccgcggccctcgagcacgacaaggcctacgaccggcagctcgacggcggagacaacccgtacctcaagtacaaccacgccgacgcggagttccaggagcgtcttaaagaagatacgtcttttgggggcaacctcggacgagcagtcttccaggcgaaaaagagggttcttgaacctctgggcctggttgaggaacctgttaagacggctccgggaaaaaagaggccggtagagcactctcttgcggagccagactcctcctcgggaaccggaaaagcgggccagcagcctgcaagaaggagattgaatttcggtcagactggagacgcagactccgtacctgacccccagcctctcggacagccaccagcagccccctctggtctgggaactaatacgatggctacaggcagtggcgcaccaatggcagacaataacgagggcgccgacggagtgggtaattcctcgggaaattggcattgcgattccacatggatgggcgacagagtcatcaccaccagcacccgcacctgggctctgcccacctacaacaaccacctctacaggcagatttccagccaatcaggagcctcaaacgacaaccactactttggctacagcaccccttgggggtattttgacttcaacagattccactgccacttttcgccacgtgactggcaaagactcatcaacaacaattggggatcccggcccaaaagactcaacttcaagctctttaacattcaagtcaaggaggtcacgcagaatgacggtacgacgacgattgccaataaccttaccagcacggttcaggtgtttactgactcggagtaccagctcccgtacgtcctcggctcggcgcatcaaggatgcctcccgccgttcccagcagacgtcttcatggtgccacagtatggatacctcaccctgaacaacgggagtcaggcagtaggacgctcttcattttactgcctggagtactttccttctcagatgctgcgtaccggaaacaactttaccttcagctacacctttgaggacgttcctttccacagcagctacgcccacagccagagtttggaccgtctcatgaatcctctcgtcgaccagtacctgtattacttgagcagaacaaacactccaagcggaaccaccacgcagtcaaggcttcagttttctcaggccggagcaagtgacattcgggaccagtctaggaactggcttcctggaccctgttaccgccagcagcgagtatcaaagacatctgcggataacaacaacagtgaatactcgtggactggagctaccaagtaccaccttaatggaagagactctctggtgaatccgggcccggccatggccagccacaaggacgatgaagaaaagttttttcctcagagcggggttctcatctttggaaaacaagactcgggaaaaactaatgtggacattgaaaaggtcatgattacagacgaagaggaaatcaggaccaccaatcccgtggctacggagcagtatggttctgtatctaccaacctccagagcggcaacacacaagcagctacctcagatgtcaacacacaaggcgttcttccaggcatggtgtggcaggacagagacgtgtacctgcaggggcccatctgggcaaagattccacacacggacggacattttcacccctctcccctcatgggcggattcggacttaaacaccctcccccgcagattctcatcaagaacaccccggtacctgcgaatccttcgactaccttcagtgcggcaaagtttgcttccttcattacacagtactccacggggcaggtcagcgtggagatcgagtgggagctgcagaaggagaacagcaaacgctggaatcccgagattcagtacacttccaactacaacaaatctgttaatgtggactttactgtggacactaatggtgtgtattcagagcctcgccccattggcaccagatacctgactcgtaatctgtaa

SEQ ID NO: 322 - protein, 735 aa, Artificial Sequence
  Description of Artificial Sequence: Synthetic polypeptide
MAADGYLPDWLEDTLSEGIRQWWKLKPGPPPPKPAERHKDDSRGLVLPGYKYLGPFNGLDKGEPVNEADAAALEHDKAYDRQLDGGDNPYLKYNHADAEFQERLKEDTSFGGNLGRAVFQAKKRVLEPLGLVEEPVKTAPGKKRPVEHSLAEPDSSSGTGKAGQQPARRRLNFGQTGDADSVPDPQPLGQPPAAPSGLGTNTMATGSGAPMADNNEGADGVGNSSGNWHCDSTWMGDRVITTSTRTWALPTYNNHLYRQISSQSGASNDNHYFGYSTPWGYFDFNRFHCHFSPRDWQRLINNNWGSRPKRLNFKLFNIQVKEVTQNDGTTTIANNLTSTVQVFTDSEYQLPYVLGSAHQGCLPPFPADVFMVPQYGYLTLNNGSQAVGRSSFYCLEYFPSQMLRTGNNFTFSYTFEDVPFHSSYAHSQSLDRLMNPLVDQYLYYLSRTNTPSGTTTQSRLQFSQAGASDIRDQSRNWLPGPCYRQQRVSKTSADNNNSEYSWTGATKYHLNGRDSLVNPGPAMASHKDDEEKFFPQSGVLIFGKQDSGKTNVDIEKVMITDEEEIRTTNPVATEQYGSVSTNLQSGNTQAATSDVNTQGVLPGMVWQDRDVYLQGPIWAKIPHTDGHFHPSPLMGGFGLKHPPPQILIKNTPVPANPSTTFSAAKFASFITQYSTGQVSVEIEWELQKENSKRWNPEIQYTSNYNKSVNVDFTVDTNGVYSEPRPIGTRYLTRNL

SEQ ID NO: 323 - protein, 738 aa, Artificial Sequence
  Description of Artificial Sequence: Synthetic polypeptide
MAADGYLPDWLEDNLSEGIREWWDLKPGAPKPKANQQKQDDGRGLVLPGYKYLGPFNGLDKGEPVNAADAAALEHDKAYDQQLKAGDNPYLRYNHADAEFQERLQEDTSFGGNLGRAVFQAKKRVLEPLGLVEEAAKTAPGKKRPVEPSPQRSPDSSAGIGKKGQQPAKKRLNFGQTGDSESVPDPQPIGEPPAGPSGLGSGTMAAGGGAPMADNNEGADGVGSSSGNWHCDSTWLGDRVITTSTRTWALPTYNNHLYKQISNGTSGGSTNDNTYFGYSTPWGYFDFNRFHCHFSPRDWQRLINNNWGFRPKRLSFKLFNIQVKEVTQNEGTETIANNLTSTIQVFTDSEYQLPYVLGSAHQGCLPPFPADVFMIPQYGYLTLNNGSQAVGRSSFYCLEYFPSQMLRTGNNFEFSYTFEDVPFHSSCAHSQSSDRLMNPLIDQYLYYLSRTRSTGGTQGTQQLLFSQAGPANMSAQAKNWLPGPCYRQQRVSTTLSQNNNSNFAWTGATKYHLNGRDSLVNPGVAMATHKDDEERFFPSSGVLMFGKQGAGRDNVDYSSVMLTSEEEIKTTNPVATEQYGVVADNLQQTNTGPIVGNVNSQGALPGMVWQNRDVYLQGPIWAKIPHTDGNFHPSPLMGGFGLKHPPPQILIKNTPVPADPPTTFSQAKLASFITQYSTGQVSVEIEWELQKENSKRWNPEIQYTSNYYKSTNVDFAVNTEGTYSEPRPIGTRYLTRNL

SEQ ID NO: 324 - DNA, 2217 bp, Artificial Sequence
  Description of Artificial Sequence: Synthetic polynucleotide
atggctgctgacggttatcttccagattggctcgaggacaacctctctgagggcattcgcgagtggtgggacctgaaacctggagcccccaagcccaaggccaaccagcagaagcaggacgacggccggggtctggtgcttcttggctacaagtacctcggacccttcaacggactcgacaagggggagcccgtcaatgcggcggacgcagcggccctcgagcacgacaaggcctacgaccagcagctcaaagcgggtgacaatccgtacctgcggtataaccacgccgacgccgagtttcaggagcgtctgcaagaagatacgtcttttgggggcaacctcgggcgagcagtcttccaggccaagaagcgggttctcgaacctctcggtctggttgaggaagctgctaagacggctcctggaaagaagagaccggtagaaccgtcacctcagcgttcccccgactcctccacgggcatcggcaagaaaggccagcagcccgctaaaaagagactgaactttggtcagactggcgactcagagtcagtccccgaccctcaaccaatcggagaaccaccagcaggcccctctggtctgggatctggtacaatggctgcaggcggtggcgctccaatggcagacaataacgaaggcgccgacggagtgggtagttcctcaggaaattggcattgcgattccacatggctgggcgacagagtcatcaccaccagcacccgaacctgggccctgcccacctacaacaaccacctctacaagcaaatatccaatgggacatcgggaggaagcaccaacgacaacacctacttcggctacagcaccccctgggggtattttgacttcaacagattccactgccacttctcaccacgtgactggcagcgactcatcaacaacaactggggattccggccaaaaagactcagcttcaagctcttcaacatccaggtcaaggaggtcacgcagaatgaaggcaccaagaccatcgccaataaccttaccagcacgattcaggtatttacggactcggaataccagctgccgtacgtcctcggctccgcgcaccagggctgcctgcctccgttcccggcggacgtcttcatgattccccagtacggctaccttacactgaacaatggaagtcaagccgtaggccgttcctccttctactgcctggaatattttccatctcaaatgctgcgaactggaaacaattttgaattcagctacaccttcgaggacgtgcctttccacagcggctacgcacacagccagagcttggaccgactgatgaatcctctcatcgaccagtacctgtactacttatccagaactcagtccacaggaggaactcaaggtacccagcaattgttattttctcaagctgggcctgcaaacatgtcggctcaggctaagaactggctacctggaccttgctaccggcagcagcgagtctctacgacactgtcgcaaaacaacaacagcaactttgcttggactggtgccaccaaatatcacctgaacggaagagactctttggtaaatcccggtgtcgccatggcaacccacaaggacgacgaggaacgcttcttcccgtcgagtggagtcctgatgtttggaaaacagggtgctggaagagacaatgtggactacagcagcgttatgctaaccagcgaagaagaaattaaaaccactaaccctgtagccacagaacaatacggtgtggtggctgacaacttgcagcaaaccaatacagggcctattgtgggaaatgtcaacagccaaggagccttacctggcatggtctggcagaaccgagacgtgtacctgcagggtcccatctgggccaagattcctcacacggacggcaacttccacccttcaccgctaatgggaggatttggactgaagcacccacctcctcagatcctgatcaagaacacgccggtacctgcggatcctccaacgacgttcagccaggcgaaattggcttccttcattacgcagtacagcaccggacaggtcagcgtggaaatcgagtgggagctgcagaaggagaacagcaaacgctggaacccagagattcagtacacttcaaactactacaaatctacaaatgtggactttgctgtcaatacagagggaacttattctgagcctcgccccattggtactcgttacctcacccgtaatctgtaa

SEQ ID NO: 325 - protein, 738 aa, Artificial Sequence
  Description of Artificial Sequence: Synthetic polypeptide
MAADGYLPDWLEDNLSEGIREWWDLKPGAPKPKANQQKQDDGRGLVLLGYKYLGPFNGLDKGEPVNAADAAALEHDKAYDQQLKAGDNPYLRYNHADAEFQERLQEDTSFGGNLGRAVFQAKKRVLEPLGLVEEAAKTAPGKKRPVEPSPQRSPDSSTGIGKKGQQPAKKRLNFGQTGDSESVPDPQPIGEPPAGPSGLGSGTMAAGGGAPMADNNEGADGVGSSSGNWHCDSTWLGDRVITTSTRTWALPTYNNHLYKQISNGTSGGSTNDNTYFGYSTPWGYFDFNRFHCHFSPRDWQRLINNNWGFRPKRLSFKLFNIQVKEVTQNEGTKTIANNLTSTIQVFTDSEYQLPYVLGSAHQGCLPPFPADVFMIPQYGYLTLNNGSQAVGRSSFYCLEYFPSQMLRTGNNFEFSYTFEDVPFHSGYAHSQSLDRLMNPLIDQYLYYLSRTQSTGGTQGTQQLLFSQAGPANMSAQAKNWLPGPCYRQQRVSTTLSQNNNSNFAWTGATKYHLNGRDSLVNPGVAMATHKDDEERFFPSSGVLMFGKQGAGRDNVDYSSVMLTSEEEIKTTNPVATEQYGVVADNLQQTNTGPIVGNVNSQGALPGMVWQNRDVYLQGPIWAKIPHTDGNFHPSPLMGGFGLKHPPPQILIKNTPVPADPPTTFSQAKLASFITQYSTGQVSVEIEWELQKENSKRWNPEIQYTSNYYKSTNVDFAVNTEGTYSEPRPIGTRYLTRNL

SEQ ID NO: 326 - protein, 735 aa, Artificial Sequence
  Description of Artificial Sequence: Synthetic polypeptide
MAADGYLPDWLEDTLSEGIRQWWKLKPGPPPPKPAERHKDDSRGLVLPGYKYLGPFNGLDKGEPVNEADAAALEHDKAYDRQLDSGDNPYLKYNHADAEFQERLKEDTSFGGNLGRAVFQAKKRVLEPLGLVEPPVKTAPGKKRPVEHSPAEPDSSSGTGKAGQQPARKRLNFGQTGDADSVPDPQPLGQPPAAPSGLGSTTMATGSGAPMADNNEGADGVGNSSGNWHCDSQWLGDRVITTSTRTWALPTYNNHLYKQISSQSGASNDNHYFGYSTPWGYFDFNRFHCHFSPRDWQRLINNNWGFRPKRLNFKLFNIQVKEVTQNDGTTTIANNLTSTVQVFTDSEYQLPYVLGSAHQGCLPPFPADVFMVPQYGYLTLNNGSQAVGRSSFYCLEYFPSQMLRTGNNFQFSYTFEDVPFHSSYAHSQSLDRLMNPLIDQYLYYLNKTQSNSGTLQQSRLLFSQAGPTSMSLQAKNWLPGPCYRQQRLSKQANDNNNSNFPWTAATKYHLNGRDSLVNPGPAMASHKDDEEKFFPMHGTLIFGKQGTNANDADLDNVMITDEEEIRTTNPVATEQYGYVSNNLQNSNTGPTTGTVNHQGALPGMVWQDRDVYLQGPIWAKIPHTDGHFHPSPLMGGFGLKHPPPQIMIKNTPVPANPPTNFSSAKFASFITQYSTGQVSVEIEWELQKENSKRWNPEIQYTSNYNKSVNVDFTVDTNGVYSEPRPIGTRYLTRNL

SEQ ID NO: 327 - protein, 735 aa, Artificial Sequence
  Description of Artificial Sequence: Synthetic polypeptide
MAADGYLPDWLEDTLSEGIRQWWKLKPGPPPPKPAERHKDDSRGLVLPGYKYLGPFNGLDKGEPVNEADAAALEHDKAYDRQLDSGDNPYLKYNHADAEFQERLKEDTSFGGNLGRAVFQAKKRVLEPLGLVEGPVKTAPGKKRPVEHSPAEPDSSSGTGKAGQQPARKRLNFGQTGDADSVPDPQPLGQPPAAPSGLGSTTMATGSGAPMADNNEGADGVGNSSGNWHCDSQWLGDRVITTSTRTWALPTYNNHLYKQISSQSGASNDNHYFGYSTPWGYFDFNRFHCHFSPRDWQRLINNNWGFRPKRLNFKLFNIQVKEVTQNDGTTTIANNLTSTVQVFTDSEYQLPYVLGSAHQGCLPPFPADVFMVPQYGYLTLNNGSQAVGRSSFYCLEYFPSQMLRTGNNFQFSYTFEDVPFHSSYAHSQSLDRLMNPLIDQYLYYLNKTQSNSGTLQQSRLLFSQAGPTSMSLQAKNWLPGPCYRQQRLSKQANDNNNSNFPWTAATKYHLNGRDSLVNPGPAMASHKDDEEKFFPMHGTLIFGKQGTNANDADLDNVMITDEEEIRTTNPVATEQYGYVSNNLQNSNTGPTTGTVNHQGALPGMVWQDRDVYLQGPIWAKIPHTDGHFHPSPLMGGFGLKHPPPQIMIKNTPVPANPPTNFSSAKFASFITQYSTGQVSVEIEWELQKENSKRWNPEIQYTSNYNKSVNVDFTVDTNGVYSEPRPIGTRYLTRNL

SEQ ID NO: 328 - DNA, 2208 bp, Artificial Sequence
  Description of Artificial Sequence: Synthetic polynucleotide
atggctgccgatggttatcttccagattggctcgaggacactctctctgaaggaataagacagtggtggaagctcaaacctggcccaccaccaccaaagcccgcagagcggcataaggacgacagcaggggtcttgtgcttcctgggtacaagtacctcggacccttcaacggactcgacaagggggagccggtcaacgaggcagacgccgcggccctcgagcacgacaaggcctacgaccggcagctcgacagcggagacaacccgtacctcaagtacaaccacgccgacgcggagtttcaggagcgtcttaaagaagatacgtcttttgggggcaacctcggacgagcagtcttccaggcgaaaaagagggttcttgaacctctgggcctggttgagggacctgttaagacggctccgggaaaaaagaggccggtagagcactctcctgcggagccagactcctcctcgggaaccggaaaagcgggccagcagcctgcaagaaaaagattgaattttggtcagactggagacgcagactccgtacctgacccccagcctctcggacagccaccagcagccccctctggtttgggatctactacaatggctacaggcagtggcgcaccaatggcagacaataacgagggtgccgatggagtgggtaattcctcaggaaattggcattgcgattcccaatggctgggcgacagagtcatcaccaccagcacccgaacctgggccctgcccacctacaacaaccacctctacaagcaaatctcaagccaatcaggagcctcaaacgacaaccactactttggctacagcaccccttgggggtattttgacttcaacagattccactgccacttttcaccacgtgactggcaaagactcatcaacaacaactggggattccgacccaagagactcaacttcaagctctttaacattcaagtcaaagaggtcacgcagaatgacggtacgacgacgattgccaataaccttaccagcacggttcaggtgtttactgactcggagtaccagctcccgtacgtcctcgggtcggcgcatcaaggatgcctcccgccgtttccagcggacgtcttcatggtcccacagtatggatacctcaccctgaacaacgggagtcaggcggtaggacgctcttccttttactgcctggagtactttccttctcagatgcttcgtactggaaacaactttcagttcagctacacctttgaagacgttcctttccacagcagctacgctcacagccagagtctggatcggctgatgaatcctctgatcgaccagtacctgtattatctgaacaaaacacaatcaaatagtggaactcttcagcagtctcggctactgtttagtcaagctggacccaccagcatgtctcttcaagctaaaaactggctacctggaccttgctacagacagcagcgtctgtcaaagcaggcaaacgacaacaacaacagcaactttccctggactgcggctacaaagtatcacctaaatggccgggactcgttggttaatccaggaccagctatggccagtcacaaagacgatgaagaaaagtttttccccatgcatggaaccctgatatttggtaaacaaggaacaaatgctaacgacgcggatttggacaatgtcatgattacagatgaagaagaaatccgcaccaccaatcccgtggctacggagcagtacggatatgtgtcaaataatttgcaaaactcaaatactggtccaactactggaactgtcaatcaccaaggagcgttacctggcatggtgtggcaggatcgagacgtgtacctgcagggacccatttgggccaagattcctcacaccgatggacactttcatccttctccactgatgggaggttttgggctcaaacacccgcctcctcagatcatgatcaaaaacactcccgttccagccaatcctcccacaaacttcagttctgccaagtttgcttctttcatcacacagtattccacggggcaggtcagcgtggagatcgagtgggagctgcagaaagagaacagcaaacgctggaatcccgaaattcagtacacttccaactacaacaaatctgttaatgtggactttactgtggacactaatggcgtgtattcagagcctcgccccattggcaccagatacctgactcgtaatctgtaa

SEQ ID NO: 329 - DNA, 2211 bp, Artificial Sequence; identical to SEQ ID NO: 10
  Description of Artificial Sequence: Synthetic polynucleotide

SEQ ID NO: 330 - DNA, 2208 bp, Artificial Sequence
  Description of Artificial Sequence: Synthetic polynucleotide
atggctgccgatggttatcttccagattggctcgaggacactctctctgaaggaacaagacagtggtggaagctcaaacctggcccaccaccaccaaagcccgcagagcggcataaggacgacagcaggggtcttgtgcttcctgggtacaagtacctcggacccttcaacggactcgacaagggggagccggtcaacgaggcagacgccgcggccctcgagcacgacaaggcctacgaccggcagctcgacagcggagacaacccgtacctcaagtacaaccacgccgacgcggagtttcaggagcgtcttaaagaagatacgtcttttgggggcaacctcggacgagcagtcttccaggcgaaaaagagggttcttgaacctctgggcctggttgaggaacctgttaagacggctccgggaaaaaagaggccggtagagcactctcctgcggagccagactcctcctcgggaaccggaaaagcgggccagcagcctgcaagaaaaagattgaattttggtcagactggagacgcagactccgtacctgacccccagcctctcggacagccaccagcagccccctctggtttgggatctactacaatggctacaggcagtggcgcaccaatggcagacaataacgagggtgccgatggagtgggtaattcctcaggaaattggcattgcgattcccaatggctgggcgacagagtcatcaccaccagcacccgaacctgggccctgcccacctacaacaaccacctctacaagcaaatctcaagccaatcaggagcctcaaacgacaaccactactttggctacagcaccccttgggggtattttgacttcaacagattccactgccacttttcaccacgtgactggcaaagactcatcaacaacaactggggattccgacccaagagactcaacttcaagctctttaacattcaagtcaaagaggtcacgcagaatgacggtacgacgacgattgccaataaccttaccagcacggttcaggtgtttactgactcggagtaccagctcccgtacgtcctcgggtcggcgcatcaaggatgcctcccgccgtttccagcggacgtcttcatggtcccacagtatggatacctcaccctgaacaacgggagtcaggcggtaggacgctcttccttttactgcctggagtactttccttctcagatgcttcgtactggaaacaactttcagttcagctacacctttgaagacgttcctttccacagcagctacgctcacagccagagtctggatcggctgatgaatcctctgatcgaccagtacctgtattatctgaacaaaacacaatcaaatagtggaactcttcagcagtctcggctactgtttagtcaagctggacccaccagcatgtctcttcaagctaaaaactggctacctggaccttgctacagacagcagcgtctgtcaaagcaggcaaacgacaacaacaacagcaactttccctggactgcggctacaaagtaccacctaaatggccgggactcgttggttaatccaggaccagctatggccagtcacaaagacgatgaagaaaagtttttccccatgcatggaaccctgatatttggtaaacaaggaacaaatgctaacgacgcggatttggacaatgtcatgattacagatgaagaagaaatccgcaccaccaatcccgtggctacggagcagtacggatatgtgtcaaataatttgcaaaactcaaatactggtccaactactggaactgtcaatcaccaaggagcgttacctggcatggtgtggcaggatcgagacgtgtacctgcagggacccatttgggccaagattcctcacaccgatggacactttcatccttctccactgatgggaggttttgggctcaaacacccgcctcctcagatcatgatcaaaaacactcccgttccagccaatcctcccacaaacttcagttctgccaagtttgcttctttcatcacacagtattccacggggcaggtcagcgtggagatcgagtgggagctgcagaaagagaacagcaaacgctggaatcccgaaattcagtacacttccaactacaacaaatctgttaatgtggactttactgtggacactaatggcgtgtattcagagcctcgccccattggcaccagatacctgactcgtaatctgtaa

SEQ ID NO: 331 - DNA, 2217 bp, Artificial Sequence
  Description of Artificial Sequence: Synthetic polynucleotide
atggctgctgacggttatcttccagattggctcgaggacaacctctctgagggcattcgcgagtggtgggacctgaaacctggagcccccaagcccaaggccaaccagcagaagcaggacgacggccggggtctggtgcttcctggctacaagtacctcggacccttcaacggactcgacaagggggagcccgtcaacgcggcggacgcagcggccctcgagcacgacaaggcctacgaccagcagctcaaagcgggtgacaatccgtacctgcggtataaccacgccgacgccgagtttcaggagcgtctgcaagaagatacgtcttttgggggcaacctcgggcgagcagtcttccaggccaagaagcgggttctcgaacctctcggtctggttgaggaagctgctaagacggctcctggaaagaagagaccggtagaaccgtcacctcagcgttcccccgactcctccacgggcatcggcaagaaaggccagcagcccgctaaaaagagactgaactttggtcagactggcgactcagagtcagtccccgaccctcaaccaatcggagaaccacctgcaggcccctctggtctgggatctggtacaatggctgcaggcggtggcgctccaatggcagacaataacgaaggcgccgacggagtgggtagttcctcaggaaattggcattgcgattccacatggctgggcgacagagtcatcaccaccagcacccgaacctgggccctgcccacctacaacaaccacctctacaagcaaatatccaatgggacatcgggagggagcaccaacgacaacacctacttcggctacagcaccccctgggggtattttgacttcaacagattccactgccacttctcaccacgtgactggcagcgactcatcaacaacaactggggattccggccaaaaagactcagcttcaagctcttcaacatccaggtcaaggaggtcacgcagaatgaaggcaccaagaccatcgccaataaccttaccagcacgattcaggtatttacggactcggaataccagctgccgtacgtcctcggctccgcgcaccagggctgcctgcctccgttcccggcggacgtcttcatgattccccagtacggctaccttacactgaacaatggaagtcaagccgtaggccgttcctccttctactgcctggaatattttccatctcaaatgctgcgaactggaaacaattttgaattcagctacaccttcgaggacgtgcctttccacagcagctacgcacacagccagagcttggaccgactgatgaatcctctcatcgaccagtacctgtactacttatccagaactcagtccacaggaggaactcaaggtacccagcaattgttattttctcaagctgggcctgcaaacatgtcggctcaggctaagaactggctacctggaccttgctaccggcagcagcgagtctctacgacactgtcgcaaaacaacaacagcaactttgcttggactggtgccaccaaatatcacctgaacggaagagactctttggtaaatcccggtgtcgccatggcaacccacaaggacgacgaggaacgcttcttcccgtcgagtggagtcctgatgtttggaaaacagggtgctggaagagacaatgtggactacagcagcgttatgctaaccagcgaagaagaaattaaaaccactaaccctgtagccacagaacaatacggtgtggtggctgacaacttgcagcaaaccaatacagggcctattgtgggaaatgtcaacagccaaggagccttacctggcatggtctggcagaaccgagacgtgtacctgcagggtcccatctgggccaagattcctcacacggacggcaactgccacccttcaccgctaatgggaggatttggactgaagcacccacctcctcagatcctgatcaagaacacgccggtacctgcggatcctccaacaacgttcagccaggcgaaattggcttccttcattacgcagtacagcaccggacaggtcagcgtggaaatcgagtgggagctgcagaaggagaacagcaaacgctggaacccagagattcagtacacttcaaactactacaaatctacaaatgtggactttgctgtcaatacagagggaacttattctgagcctcgccccattggtactcgttacctcacccgtaatctgtaa

SEQ ID NO: 332 - protein, 735 aa, Artificial Sequence
  Description of Artificial Sequence: Synthetic polypeptide
MAADGYLPDWLEDTLSEGTRQWWKLKPGPPPPKPAERHKDDSRGLVLPGYKYLGPFNGLDKGEPVNEADAAALEHDKAYDRQLDSGDNPYLKYNHADAEFQERLKEDTSFGGNLGRAVFQAKKRVLEPLGLVEEPVKTAPGKKRPVEHSPAEPDSSSGTGKAGQQPARKRLNFGQTGDADSVPDPQPLGQPPAAPSGLGSTTMATGSGAPMADNNEGADGVGNSSGNWHCDSQWLGDRVITTSTRTWALPTYNNHLYKQISSQSGASNDNHYFGYSTPWGYFDFNRFHCHFSPRDWQRLINNNWGFRPKRLNFKLFNIQVKEVTQNDGTTTIANNLTSTVQVFTDSEYQLPYVLGSAHQGCLPPFPADVFMVPQYGYLTLNNGSQAVGRSSFYCLEYFPSQMLRTGNNFQFSYTFEDVPFHSSYAHSQSLDRLMNPLIDQYLYYLNKTQSNSGTLQQSRLLFSQAGPTSMSLQAKNWLPGPCYRQQRLSKQANDNNNSNFPWTAATKYHLNGRDSLVNPGPAMASHKDDEEKFFPMHGTLIFGKQGTNANDADLDNVMITDEEEIRTTNPVATEQYGYVSNNLQNSNTGPTTGTVNHQGALPGMVWQDRDVYLQGPIWAKIPHTDGHFHPSPLMGGFGLKHPPPQIMIKNTPVPANPPTNFSSAKFASFITQYSTGQVSVEIEWELQKENSKRWNPEIQYTSNYNKSVNVDFTVDTNGVYSEPRPIGTRYLTRNL

SEQ ID NO: 333 - DNA, 2208 bp, Artificial Sequence
  Description of Artificial Sequence: Synthetic polynucleotide
atggctgccgatggttatcttccagattggctcgaggacactctctctgaaggaataagacagtggtggaagctcaaacctggcccaccaccaccaaagcccgcagagcggcatcaggacaacagcaggggtcttgtgcttcctgggtacaagtacctcggaccctccaacggactcgacaaaggagagccggtcaacgaggcagacgccgcggccctcgagcacgacaaggcctacgaccggcagctcgacagcggagacaacccgtacctcaagtacaaccacgccgacgcggagtttcaggagcgtcttaaagaagatacgtcttttgggggcaacctcggacgagcagtcttccaggcgaaaaagagggttcttgaacctctgggcctggttgaggaacctgttaagacggctccgggaaaaaagaggccggtagagcactctcctgtggagccagactcctcctcgggaaccggaaaagcgggccatcagcctgcgagaaagagattgaattttggtcagactggagacgcagactccgtacctgacccccagcctctcggacagccaccagcagcccccacaagtttgggatctactacaatggctacaggcagtggcgcaccaatggcagacaataacgagggtgccgatggagtgggtaattcctcaggaaattggcattgcgattcccaatggctgggcgacagagtcatcaccaccagcacccgaacctgggccctgcccacctacaacaaccacctctacaagcaaatctccagccaatcaggagcctcgaacgacaaccactactttggctgcagcaccccctgggggtattttgacttcaacagattccactgtcacttctccccacgtgattggcaaagactcatcaacaacaactggggattccgacccaagagactcaacttcaagctctttaacattcaagtcaaagaggtcacgcagaatgacggtacgacgacgattgccaataaccttaccagcacggttcaggtgtttactgactcggagtacccgctcccgtacgtcctcggctcggcgcatcaaggatgcctcccgccgtttccagcggacgtcttcatggtcccacagtatggatacctcaccctgaacaacgggagtcaggcggtaggacgctcttccttttactgcctggagtactttccttctcagatgctgcgtaccggaaacaactttaccttcagctacacctttgaggacgttcctttccacagcagctacgctcacagccagagtttggaccggctgatgaatcctctgatcgaccagtatctatattatctgaacaggacacaatcaaatagtggaactcttcagcagtctaggctactgtttagccaagctggacccaccagcatgtctcttcaagctaaaaactggctgcctggaccttgctacagacagcagcgtctttcaaagcaggcaaacgacaacaacaacagcaactttccctggactgcggctacaaagtatcatctaaatggccgggactcgttggttaatccaggaccagctatggccagccacaaagacgatgaagaaaagtttttccccatgcatggaaccctgatatttggtaaacaaggaacaaatgctaacgacgcggatttggagcatgttatgattacagatgaagaagaaatcaggaccaccaatcctgtggctacagagcagtacggaaacgtgtcaaataatttgcaaaactcaaatactggtccaactacagaaaatgtcaatcaccagggagcgttacctggtatggtgtggcaggatcgagacgtgtacctgcagggacccatttgggccaagattcctcacaccgacggacactttcacccttctccactgatgggaggttttggactcaaacacccgcctcctcaaatcatgatcaaaaacactcccgttccagccaatcctcccacaaacttcagttctgccaagtttgcttctttcatcacacagtattccacgggccaggtcagcgtggagattgagtgggagctgcagaaggagaacagcaaacgctggaaccccgagatccagtatacttccaactacaacaaatctgttaatgtggactttactgtggacactaatggtgtgtattcagagccttgccccattggcaccagatacctgactcgtaatctgtaa

SEQ ID NO: 334 - protein, 735 aa, Artificial Sequence
  Description of Artificial Sequence: Synthetic polypeptide
MAADGYLPDWLEDTLSEGIRQWWKLKPGPPPPKPAERHQDNSRGLVLPGYKYLGPSNGLDKGEPVNEADAAALEHDKAYDRQLDSGDNPYLKYNHADAEFQERLKEDTSFGGNLGRAVFQAKKRVLEPLGLVEEPVKTAPGKKRPVEHSPVEPDSSSGTGKAGHQPARKRLNFGQTGDADSVPDPQPLGQPPAAPTSLGSTTMATGSGAPMADNNEGADGVGNSSGNWHCDSQWLGDRVITTSTRTWALPTYNNHLYKQISSQSGASNDNHYFGCSTPWGYFDFNRFHCHFSPRDWQRLINNNWGFRPKRLNFKLFNIQVKEVTQNDGTTTIANNLTSTVQVFTDSEYPLPYVLGSAHQGCLPPFPADVFMVPQYGYLTLNNGSQAVGRSSFYCLEYFPSQMLRTGNNFTFSYTFEDVPFHSSYAHSQSLDRLMNPLIDQYLYYLNRTQSNSGTLQQSRLLFSQAGPTSMSLQAKNWLPGPCYRQQRLSKQANDNNNSNFPWTAATKYHLNGRDSLVNPGPAMASHKDDEEKFFPMHGTLIFGKQGTNANDADLEHVMITDEEEIRTTNPVATEQYGNVSNNLQNSNTGPTTENVNHQGALPGMVWQDRDVYLQGPIWAKIPHTDGHFHPSPLMGGFGLKHPPPQIMIKNTPVPANPPTNFSSAKFASFITQYSTGQVSVEIEWELQKENSKRWNPEIQYTSNYNKSVNVDFTVDTNGVYSEPCPIGTRYLTRNL

SEQ ID NO: 335 - DNA, 2214 bp, Artificial Sequence
  Description of Artificial Sequence: Synthetic polynucleotide
atggctgccgatggttatcttccagattggctcgaggacaaccttagtgaaggaattcgcgagtggtgggctttgaaacctggagcccctcaacccaaggcaaatcaacaacatcaagacaacgctcgaggtcttgtgcttccgggttacaaataccttggacccggcaacggactcgacaagggggagccggtcaacgcagcagacgcggcggccctcgagcacgacaaggcctacgaccagcagctgcaggcgggtgacaatccgtacctgcggtataaccacgccgacgccgagtttcaggagcgtctgcaagaagatacgtcttttgggggcaaccttggcagagcagtcttccaggccaaaaagaggatccttgagcctcttggtctggttgaggaagcagctaaaacggctcctggaaagaagaggcctgtagatcagtctcctcaggaaccggactcatcatctggtgttggcaaatcgggcaaacagcctgccagaaaaagactaaatttcggtcagactggcgactcagagtcagtcccagaccctcaacctctcggagaaccaccagcagcccccacaagtttgggatctaatacaatggcttcaggcggtggcgcaccaatggcagacaataacgagggtgccgatggggtgggtagttcctcgggaaattggcattgcgattcccaatggctgggggacagagtcatcaccaccagcacccgaacctgggccctgcccacctacaacaatcacctctacaagcaaatctccaacgggacatcgggaggagccaccaacgacaacacctacttcggctacagcaccccctgggggtattttgactttaacagattccactgccacttttcaccacgtgactggcagcgactcatcaacaacaactggggattccggcccaagagactcagcttcaagctcttcaacatccaggtcaaggaggtcacgcagaatgaaggcaccaagaccatcgccaataacctcaccagcaccatccaggtgtttacggactcggagtaccagctgccgtacgttctcggctctgcgcaccagggctgcctccctccgttcccggcggacgtgttcatgattccgcaatacggctacctgacgctcaacaatggcagccaagccgtgggacgttcatccttttactgcctggaatatttcccttctcagatgctgagaacgggcaacaactttaccttcagctacacctttgaggaagtgcctttccacagcagctacgcgcacagccagagcttggaccggctgatgaatcctctgattgaccagtacctgtactacttgtctcggactcaaacaacaggaggcacggcaaatacgcagactctgggcttcagccaaggtgggcctaatacaatggccaatcaggcaaagaactggctgccaggaccctgttaccgccaacaacgcgtctcaacgacaaccgggcaaaacaacaatagcaactttgcctggactgctgggaccaaataccatctgaatggaagaaattcattggctaatcctggcatcgctatggcaacacacaaagacgacgaggagcgtttttttcccagtaacgggatcctgatttttggcaaacaaaatgctgccagagacaatgcggattacagcgatgtcatgctcaccagcgaggaagaaatcaaaaccactaaccctgtggctacagaggaatacggtatcgtggcagataacttgcagcagcaaaacacggctcctcaaattggaactgtcaacagccagggggccttacccggtatggtctggcagaaccgggacgtgtacctgcagggtcccatctgggccaagattcctcacacggacggcaacttccacccgtctccgctgatgggcggctttggcctgaaacatcctccgcctcagatcctgatcaagaacacgcctgtacctgcggatcctccgaccaccttcaaccagtcaaagctgaactctttcatcacgcaatacagcaccggacaggtcagcgtggagatcgagtgggagctgcagaaggaaaacagcaagcgctggaacccggagatccagtacacttccaactattacaagtctaataatgttgaatttgctgttaatactgaaggtgtatatagtgaaccccgccccattggcaccagatacctgactcgtaatctgtaa

SEQ ID NO: 336 - protein, 737 aa, Artificial Sequence
  Description of Artificial Sequence: Synthetic polypeptide
MAADGYLPDWLEDNLSEGIREWWALKPGAPQPKANQQHQDNARGLVLPGYKYLGPGNGLDKGEPVNAADAAALEHDKAYDQQLQAGDNPYLRYNHADAEFQERLQEDTSFGGNLGRAVFQAKKRILEPLGLVEEAAKTAPGKKRPVDQSPQEPDSSSGVGKSGKQPARKRLNFGQTGDSESVPDPQPLGEPPAAPTSLGSNTMASGGGAPMADNNEGADGVGSSSGNWHCDSQWLGDRVITTSTRTWALPTYNNHLYKQISNGTSGGATNDNTYFGYSTPWGYFDFNRFHCHFSPRDWQRLINNNWGFRPKRLSFKLFNIQVKEVTQNEGTKTIANNLTSTIQVFTDSEYQLPYVLGSAHQGCLPPFPADVFMIPQYGYLTLNNGSQAVGRSSFYCLEYFPSQMLRTGNNFTFSYTFEEVPFHSSYAHSQSLDRLMNPLIDQYLYYLSRTQTTGGTANTQTLGFSQGGPNTMANQAKNWLPGPCYRQQRVSTTTGQNNNSNFAWTAGTKYHLNGRNSLANPGIAMATHKDDEERFFPSNGILIFGKQNAARDNADYSDVMLTSEEEIKTTNPVATEEYGIVADNLQQQNTAPQIGTVNSQGALPGMVWQNRDVYLQGPIWAKIPHTDGNFHPSPLMGGFGLKHPPPQILIKNTPVPADPPTTFNQSKLNSFITQYSTGQVSVEIEWELQKENSKRWNPEIQYTSNYYKSNNVEFAVNTEGVYSEPRPIGTRYLTRNL

SEQ ID NO: 337 - DNA, 2211 bp, Artificial Sequence
  Description of Artificial Sequence: Synthetic polynucleotide
atggctgccgatggttatcttccagattggctcgaggacaacctctctgagggcattcgcgagtggtgggacttgaaacctggagccccgaagcccaaagccaaccagcaaaagcaggacgacggccggggtctggtgcttcctggctacaagtacctcggacccttcaacggactcgacaagggggagcccgtcaacgcggcggacgcagcggccctcgagcacgacaaggcctacgaccagcagctcaaagcgggtgacaatccgtacctgcggtataaccacgccgacgccgagtttcaggagcgtctgcaagaagatacgtcttttgggggcaacctcgggcgagcagtcttccaggccaagaagcgggttctcgaacctctcggtctggttgaggaaggcgctaagacggctcctggaaagaaacgtccggtagagcagtcgccacaagagccagactcctcctcgggcatcggcaagacaggccagcagcccgctaaaaagagactcaattttggtcagactggcgactcagagtcagtccccgacccacaacctctcggagaacctccagcaacccccgctgctgtgggacctactacaatggcttcaggcggtggcgcaccaatggcagacaataacgaaggcgccgacggagtgggtaatgcctcaggaaattggcattgcgattccacatggctgggcgacagagtcatcaccaccagcacccgaacatgggccttgcccacctataacaaccacctctacaagcaaatctccagtgcttcaacgggggccagcaacgacaaccactacttcggctacagcaccccctgggggtattttgatttcaacagattccactgccatttctcaccacgtgactggcagcgactcatcaacaacaattggggattccggcccaagagactcaacttcaagctcttcaacatccaagtcaaggaggtcacgacgaatgatggcgtcacgaccatcgctaataaccttaccagcacggttcaagtcttctcggactcggagtaccagctgccgtacgttctcggctctgcccaccagggctgcctgcctccgttcccggcggacgtgttcatgattccccagtacggctacctaacactcaacaacggtagtcaggccgtgggacgctcctccttctactgcctggaatactttccttcgcagatgctgagaaccggcaacaacttccagtttacttacaccttcgaggacgtgcctttccacagcagctacgcccacagccagagcttggaccggctgatgaatcctctgattgaccagtacctgtactacttgtctcggactcaaacaacaggaggcacggcaaatacgcagactctgggcttcagccaaggtgggcctaatacaatggccaatcaggcaaagaactggctgccaggaccctgttaccgccaacaacgcgtctcaacgacaaccgggcaaaacaacaatagcaattttacctggactggtgcttcaaaatataacctcaatgggcgtgaatccatcatcaaccctggcactgctatggcctcacacaaagacgacgaagacaagttctttcccatgagcggtgtcatgatttttggaaaagagagcgccggagcttcaaacactgcattggacaatgtcatgattacagacgaagaggaaattaaagccactaaccctgtggccaccgaaagatttgggaccgtggcagtcaatttccagagcagcagcacagaccctgcgaccggagatgtgcatgctatgggagcattacctggcatggtgtggcaagatagagacgtgtacctgcagggtcccatttgggccaaaattcctcacacagatggacactttcacccgtctcctcttatgggcggctttggactcaagaacccgcctcctcagatcctcatcaaaaacacgcctgttcctgcgaatcctccggcggagttttcagctacaaagtttgcttcattcatcacccaatactccacaggacaagtgagtgtggaaattgaatgggagctgcagaaagaaaacagcaagcgctggaatcccgaagtgcagtacacatccaattatgcaaaatctgccaacgttgattttactgtggacaacaatggactttatactgagcctcgccccattggcacccgttacctcacccgtcccctgtaa

SEQ ID NO: 338 - protein, 736 aa, Artificial Sequence
  Description of Artificial Sequence: Synthetic polypeptide
MAADGYLPDWLEDNLSEGIREWWDLKPGAPKPKANQQKQDDGRGLVLPGYKYLGPFNGLDKGEPVNAADAAALEHDKAYDQQLKAGDNPYLRYNHADAEFQERLQEDTSFGGNLGRAVFQAKKRVLEPLGLVEEGAKTAPGKKRPVEQSPQEPDSSSGIGKTGQQPAKKRLNFGQTGDSESVPDPQPLGEPPATPAAVGPTTMASGGGAPMADNNEGADGVGNASGNWHCDSTWLGDRVITTSTRTWALPTYNNHLYKQISSASTGASNDNHYFGYSTPWGYFDFNRFHCHFSPRDWQRLINNNWGFRPKRLNFKLFNIQVKEVTTNDGVTTIANNLTSTVQVFSDSEYQLPYVLGSAHQGCLPPFPADVFMIPQYGYLTLNNGSQAVGRSSFYCLEYFPSQMLRTGNNFQFTYTFEDVPFHSSYAHSQSLDRLMNPLIDQYLYYLSRTQTTGGTANTQTLGFSQGGPNTMANQAKNWLPGPCYRQQRVSTTTGQNNNSNFTWTGASKYNLNGRESIINPGTAMASHKDDEDKFFPMSGVMIFGKESAGASNTALDNVMITDEEEIKATNPVATERFGTVAVNFQSSSTDPATGDVHAMGALPGMVWQDRDVYLQGPIWAKIPHTDGHFHPSPLMGGFGLKNPPPQILIKNTPVPANPPAEFSATKFASFITQYSTGQVSVEIEWELQKENSKRWNPEVQYTSNYAKSANVDFTVDNNGLYTEPRPIGTRYLTRPL

SEQ ID NO: 339 - DNA, 2211 bp, Artificial Sequence
  Description of Artificial Sequence: Synthetic polynucleotide
atggctgctgacggttatcttccagattggctcgaggacaacctttctgaaggcattcgagagtggtgggcgctgcaacctggagcccctaaacccaaggcaaatcaacaacatcaggacaacgctcggggtcttgtgcttccgggttacaaatacctcggacccggcaacggactcgacaagggggaacccgtcaacgcagcggacgcggcagccctcgagcacgacaaggcctacgaccagcagctcaaggccggtgacaacccctacctcaagtacaaccacgccgacgccgagttccaggagcggctcaaagaagatacgtcttttgggggcaacctcgggcgagcagtcttccaggccaaaaagaggcttcttgaacctcttggtctggttgaggaagcggctaagacggctcctggaaagaagaggcctgtagatcagtctcctcaggaaccggactcatcatctggtgttggcaaatcgggcaaacagcctgccagaaaaagactaaatttcggtcagactggcgactcagagtcagtcccagaccctcaacctctcggagaaccaccagcagcccccacaagtttgggatctaatacaatggcttcaggcggtggcgcaccaatggcagacaataacgagggtgccgatggagtgggtaattcctcaggaaattggcattgcgattcccaatggctgggcgacagagtcatcaccaccagcaccagaacctgggccctgcccacttacaacaaccatctctacaagcaaatctccagccaatcaggagcttcaaacgacaaccactactttggctacagcaccccttgggggtattttgactttaacagattccactgccacttctcaccacgtgactggcagcgactcattaacaacaactggggattccggcccaagaaactcagcttcaagctcttcaacatccaagttaaagaggtcacgcagaacgatggcacgacgactattgccaataaccttaccagcacggttcaagtgtttacggactcggagtatcagctcccgtacgtgctcgggtcggcgcaccaaggctgtctcccgccgtttccagcggacgtcttcatggtccctcagtatggatacctcaccctgaacaacggaagtcaagcggtgggacgctcatccttttactgcctggagtacttcccttcgcagatgctaaggactggaaataacttccaattcagctataccttcgaggatgtaccttttcacagcagctacgctcacagccagagtttggatcgcttgatgaatcctcttattgatcagtatctgtactacctgaacagaacgcaaggaacaacctctggaacaaccaaccaatcacggctgctttttagccaggctgggcctcagtctatgtctttgcaggccagaaattggctacctgggccctgctaccggcaacagagactttcaaagactgctaacgacaacaacaacagtaactttccttggacagcggccagcaaatatcatctcaatggccgcgactcgctggtgaatccaggaccagctatggccagtcacaaggacgatgaagaaaaatttttccctatgcacggcaatctaatatttggcaaagaagggacaacggcaagtaacgcagaattagataatgtaatgattacggatgaagaagagattcgtaccaccaatcctgtggcaacagagcagtatggaactgtggcaaataacttgcagagctcaaatacagctcccacgactagaactgtcaatgatcagggggccttacctggcatggtgtggcaagatcgtgacgtgtaccttcaaggacctatctgggcaaagattcctcacacggatggacactttcatccttctcctctgatgggaggctttggactgaaacatccgcctcctcaaatcatgatcaaaaatactccggtaccggcaaatcctccgacgactttcagcccggccaagtttgcttcatttatcactcagtactccactggacaggtcagcgtggaaattgagtgggagctacagaaagaaaacagcaaacgttggaatccagagattcagtacacttccaactacaacaagtctgttaatgtggactttactgtagacactaatggtgtttatagtgaacctcgccccattggcacccgttaccttacccgtcccctgtaa

SEQ ID NO: 340 - protein, 736 aa, Artificial Sequence
  Description of Artificial Sequence: Synthetic polypeptide
MAADGYLPDWLEDNLSEGIREWWALQPGAPKPKANQQHQDNARGLVLPGYKYLGPGNGLDKGEPVNAADAAALEHDKAYDQQLKAGDNPYLKYNHADAEFQERLKEDTSFGGNLGRAVFQAKKRLLEPLGLVEEAAKTAPGKKRPVDQSPQEPDSSSGVGKSGKQPARKRLNFGQTGDSESVPDPQPLGEPPAAPTSLGSNTMASGGGAPMADNNEGADGVGNSSGNWHCDSQWLGDRVITTSTRTWALPTYNNHLYKQISSQSGASNDNHYFGYSTPWGYFDFNRFHCHFSPRDWQRLINNNWGFRPKKLSFKLFNIQVKEVTQNDGTTTIANNLTSTVQVFTDSEYQLPYVLGSAHQGCLPPFPADVFMVPQYGYLTLNNGSQAVGRSSFYCLEYFPSQMLRTGNNFQFSYTFEDVPFHSSYAHSQSLDRLMNPLIDQYLYYLNRTQGTTSGTTNQSRLLFSQAGPQSMSLQARNWLPGPCYRQQRLSKTANDNNNSNFPWTAASKYHLNGRDSLVNPGPAMASHKDDEEKFFPMHGNLIFGKEGTTASNAELDNVMITDEEEIRTTNPVATEQYGTVANNLQSSNTAPTTRTVNDQGALPGMVWQDRDVYLQGPIWAKIPHTDGHFHPSPLMGGFGLKHPPPQIMIKNTPVPANPPTTFSPAKFASFITQYSTGQVSVEIEWELQKENSKRWNPEIQYTSNYNKSVNVDFTVDTNGVYSEPRPIGTRYLTRPL

SEQ ID NO: 341 - DNA, 2211 bp, Artificial Sequence
  Description of Artificial Sequence: Synthetic polynucleotide
atggctgccgatggttatcttccagattggctcgaggacaaccttagtgaaggaattcgcgagtggtgggctttgaaacctggagcccctcaacccaaggcaaatcaacaacatcaagacaacgctcgaggtcttgtgcttccgggttacaaataccttggacccggcaacggactcgacaagggggagccggtcaacgcagcagacgcggcggccctcgagcacgacaaggcctacgaccagcagctcaaggccggagacaacccgtacctcaagtacaaccacgccgacgccgagttccaggagcggctcaaagaagatacgtcttttgggggcaacctcgggcgagcagtcttccaggccaaaaagaggcttcttgaacctcttggtctggttgaggaagcggctaagacggctcctggaaagaagagaccggtagagccatcaccccagcgttctccagactcctctacgggcatcggcaagaaaggccaacagcccgctaaaaagagactcaattttggtcagactggcgactcagagtcagtccccgacccacaacctctcggagaacctccagcaacccccgctgctgtgggacctactacaatggcttcaggcggtggcgcaccaatggcagacaataacgagggtgccgatggagtgggtaattcctcaggaaattggcattgcgattcccaatggctgggcgacagagtcatcaccaccagcaccagaacctgggccctgcccacttacaacaaccatctctacaagcaaatctccagccaatcaggagcttcaaacgacaaccactactttggctacagcaccccttgggggtattttgactttaacagattccactgccacttttcaccacgtgactggcaaagactcatcaacaacaactggggattccgacccaagagactcaacttcaagctcttcaacatccaagtcaaggaggtcacgacgaatgatggcgtcacgaccatcgctaataaccttaccagcacggttcaagtcttctcggactcggagtaccagttgccgtacgtcctcggctctgcgcaccagggctgcctccctccgttcccggcggacgtgttcatgattccgcagtacggctacctaacgctcaacaatggcagccaagccgtgggacgttcatccttttactgcctggaatatttcccttctcagatgctgagaacgggcaacaactttaccttcagctacacttttgaggacgttcctttccacagcagctacgctcacagccagagtctggaccgtctcatgaatcctctcatcgaccagtacctgtattacttgagcagaacaaacactccaagtggaaccaccacgcagtcaaggcttcagttttctcaggccggagcgagtgacattcgggaccagtctaggaactggcttcctggaccctgttaccgccagcagcgcgtttctaaaacaaaaacagacaacaacaacagcaattttacctggactggtgcttcaaaatataaccttaatgggcgtgaatctataatcaaccctggcactgctatggcctcacacaaagacgacgaagacaagttctttcccatgagcggtgtcatgatttttggaaaagagagcgccggagcttcaaacactgcattggacaatgtcatgattacagacgaagaggaaattaaagccactaaccctgtggccaccgaaagatttgggaccgtggcagtcaatttccagagcagcagcacagaccctgcgaccggagatgtgcatgttatgggagccttacctggaatggtgtggcaagacagagacgtatacctgcagggtcctatttgggccaaaattcctcacacggatggacactttcacccgtctcctcttatgggcggctttggactcaagaacccgcctcctcagatcctcatcaaaaacacgcctgttcctgcgaatcctccggcggagttttcagctacaaagtttgcttcattcatcacccaatactccacaggacaagtgagtgtggaaattgaatgggagctgcagaaagaaaacagcaagcgctggaatcccgaagtgcagtacacatccaattatgcaaaatctgccaacgttgattttactgtggacaacaatggactttatactgagcctcgccccattggcacccgttaccttacccgtcccctgtaa

SEQ ID NO: 342 - protein, 736 aa, Artificial Sequence
  Description of Artificial Sequence: Synthetic polypeptide
MAADGYLPDWLEDNLSEGIREWWALKPGAPQPKANQQHQDNARGLVLPGYKYLGPGNGLDKGEPVNAADAAALEHDKAYDQQLKAGDNPYLKYNHADAEFQERLKEDTSFGGNLGRAVFQAKKRLLEPLGLVEEAAKTAPGKKRPVEPSPQRSPDSSTGIGKKGQQPAKKRLNFGQTGDSESVPDPQPLGEPPATPAAVGPTTMASGGGAPMADNNEGADGVGNSSGNWHCDSQWLGDRVITTSTRTWALPTYNNHLYKQISSQSGASNDNHYFGYSTPWGYFDFNRFHCHFSPRDWQRLINNNWGFRPKRLNFKLFNIQVKEVTTNDGVTTIANNLTSTVQVFSDSEYQLPYVLGSAHQGCLPPFPADVFMIPQYGYLTLNNGSQAVGRSSFYCLEYFPSQMLRTGNNFTFSYTFEDVPFHSSYAHSQSLDRLMNPLIDQYLYYLSRTNTPSGTTTQSRLQFSQAGASDIRDQSRNWLPGPCYRQQRVSKTKTDNNNSNFTWTGASKYNLNGRESIINPGTAMASHKDDEDKFFPMSGVMIFGKESAGASNTALDNVMITDEEEIKATNPVATERFGTVAVNFQSSSTDPATGDVHVMGALPGMVWQDRDVYLQGPIWAKIPHTDGHFHPSPLMGGFGLKNPPPQILIKNTPVPANPPAEFSATKFASFITQYSTGQVSVEIEWELQKENSKRWNPEVQYTSNYAKSANVDFTVDNNGLYTEPRPIGTRYLTRPL

SEQ ID NO: 343 - DNA, 2211 bp, Artificial Sequence
  Description of Artificial Sequence: Synthetic polynucleotide
atggctgccgatggttatcttccagattggctcgaggacaacctctctgagggcattcgcgagtggtgggacttgaaacctggagcccctaaacccaaggcaaatcaacaacatcaggacaacgctcgaggtcttgtgcttccgggttacaaataccttggacccggcaacggactcgacaagggggagccggtcaacgcagcagacgcggcggccctcgagcacgacaaggcctacgaccagcagctcaaggccggagacaacccgtacctcaagtacaaccacgccgacgccgagttccaggagcggctcaaagaagatacgtcttttgggggcaacctcgggcgagcagtcttccaggccaaaaagaggcttcttgaacctcttggtctggttgaggaagcggctaagacggctcctggaaagaagagaccggtagagccatcaccccagcgttctccagactcctctacgggcatcggcaagaaaggccaacagcccgctaaaaagagactcaattttggtcagactggcgactcagagtcagtccccgacccacaacctctcggagaacctccagcaacccccgctgctgtgggacctactacaatggcttcaggcggtggcgcaccaatggcagacaataacgagggtgccgatggagtgggtaattcctcaggaaattggcattgcgattcccaatggctgggcgacagagtcatcaccaccagcaccagaacctgggccctgcccacttacaacaaccatctctacaagcaaatctccagccaatcaggagcttcaaacgacaaccactactttggctacagcaccccttgggggtattttgactttaacagattccactgccacttttcaccacgtgactggcaaagactcatcaacaacaactggggattccgacccaagagactcaacttcaagctcttcaacatccaagtcaaggaggtcacgacgaatgatggcgtcacgaccatcgctaataaccttaccagcacggttcaagtcttctcggactcggagtaccagttgccgtacgtcctcggctctgcgcaccagggctgcctccctccgttcccggcggacgtgttcatgattccgcagtacggctacctaacgctcaacaatggcagccaagccgtgggacgttcatccttttactgcctggaatatttcccttctcagatgctgagaacgggcaacaactttaccttcagctacacttttgaggacgttcctttccacagcagctacgctcacagccagagtctggaccgtctcatgaatcccctcatcgaccagtacctgtattacttgagcagaacaaacactccaagtggaaccaccacgcagtcaaggcttcagttttctcaggccggagcgagtgacattcgggaccagtctaggaactggcttcctggaccctgttaccggcagcagcgcgtttctaaaacaaaaacagacaacaacaacagcaactttacctggactggtgcttcaaaatataaccttaatgggcgtgaatctataatcaaccctggcactgctatggcctcacacaaagacgacgaagacaagttctttcccatgagcggtgtcatgatttttggaaaggagagcgccggagcttcaaacactgcattggacaatgtcatgatcacagacgaagaggaaatcaaagccactaaccccgtggccaccgaaagatttgggactgtggcagtcaatctccagagcagcagcacagaccctgcgaccggagatgtgcatgttatgggagccttacctggaatggtgtggcaagacagagacgtgtacctgcagggtcctatttgggccaaaattcctcacacggatggacactttcacccgtctcctctcatgggcggctttggacttaagcacccgcctcctcagatcctcatcaaaaacacgcctgttcctgcgaatcctccggcagagttttcggctacaaagtttgcttcattcatcacccagtattccacaggacaagtgagtgtggaaattgaatgggagctgcagaaagaaaacagcaagcgctggaatcccgaagtgcagtacacatccaattatgcaaaatctgccaacgttgattttactgtggacaacaatggactttatactgagcctcgccccattggcacccgttacctcacccgtcccctgtaa

SEQ ID NO: 344 - protein, 736 aa, Artificial Sequence
  Description of Artificial Sequence: Synthetic polypeptide
MAADGYLPDWLEDNLSEGIREWWDLKPGAPKPKANQQHQDNARGLVLPGYKYLGPGNGLDKGEPVNAADAAALEHDKAYDQQLKAGDNPYLKYNHADAEFQERLKEDTSFGGNLGRAVFQAKKRLLEPLGLVEEAAKTAPGKKRPVEPSPQRSPDSSTGIGKKGQQPAKKRLNFGQTGDSESVPDPQPLGEPPATPAAVGPTTMASGGGAPMADNNEGADGVGNSSGNWHCDSQWLGDRVITTSTRTWALPTYNNHLYKQISSQSGASNDNHYFGYSTPWGYFDFNRFHCHFSPRDWQRLINNNWGFRPKRLNFKLFNIQVKEVTTNDGVTTIANNLTSTVQVFSDSEYQLPYVLGSAHQGCLPPFPADVFMIPQYGYLTLNNGSQAVGRSSFYCLEYFPSQMLRTGNNFTFSYTFEDVPFHSSYAHSQSLDRLMNPLIDQYLYYLSRTNTPSGTTTQSRLQFSQAGASDIRDQSRNWLPGPCYRQQRVSKTKTDNNNSNFTWTGASKYNLNGRESIINPGTAMASHKDDEDKFFPMSGVMIFGKESAGASNTALDNVMITDEEEIKATNPVATERFGTVAVNLQSSSTDPATGDVHVMGALPGMVWQDRDVYLQGPIWAKIPHTDGHFHPSPLMGGFGLKHPPPQILIKNTPVPANPPAEFSATKFASFITQYSTGQVSVEIEWELQKENSKRWNPEVQYTSNYAKSANVDFTVDNNGLYTEPRPIGTRYLTRPL

SEQ ID NO: 345 - DNA, 2214 bp, Artificial Sequence
  Description of Artificial Sequence: Synthetic polynucleotide
atggctgccgatggttatcttccagattggctcgaggacaaccttagtgaaggaattcgcgagtggtgggctttgaaacctggagcccctcaacccaaggcaaatcaacaacatcaagacaacgctcgaggtcttgtgcttccgggttacaaataccttggacccggcaacggactcgacaagggggagccggtcaacgcagcagacgcggcggccctcgagcacgacaaggcctacgaccagcagctgcaggcgggtgacaatccgtacctgcggtataaccacgccgacgccgagtttcaggagcgtctgcaagaagatacgtcttttgggggcaaccttggcagagcagtcttccaggccaaaaagaggatccttgagcctcttggtctggttgaggaagcagctaaaacggctcctggaaagaagaggcctgtagatcagtctcctcaggaaccggactcatcatctggtgttggcaaatcgggcaaacagcctgccagaaaaagactaaatttcggtcagactggcgactcagagtcagtcccagaccctcaacctctcggagaaccaccagcagcccccacaagtttgggatctaatacaatggcttcaggcggtggcgcaccaatggcagacaataacgagggtgccgatggggtgggtagttcctcgggaaattggcattgcgattcccaatgactgggggacagagtcatcaccaccagcacccgaacctgggccctgcccacctacaacaatcacctctacaagcaaatctccaacgggacatcgggaggagccaccaacgacaacacctacttcggctacagcaccccctgggggtattttgactttaacagattccactgccacttttcaccacgtgactggcagcgactcatcaacaacaactggggattccggcccaagagactcagcttcaagctcttcaacatccaggtcaaggaggtcacgcagaatgaaggcaccaagaccatcgccaataacctcaccagcaccatccaggtgtttacggactcggagtaccagctgccgtacgttctcggctctgcgcaccagggctgcctccctccgttcccggcggacgtgttcatgattccgcaatacggctacctgacgctcaacaatggcagccaagccgtgggacgttcatccttttactgcctggaatatttcccttctcagatgctgagaacgggcaacaactttaccttcagctacacctttgaggaagtgcctttccacagcagctacgcgcacagccagagcttggaccggctgatgaatcctctgattgaccagtacctgtactacttgtctcggactcaaacaacaggaggcacggcaaatacgcagactctgggcttcagccaaggtgggcctaatacaatggccaatcaggcaaagaactggctgccaggaccctgttaccgccaacaacgcgtctcaacgacaaccgggcaaaacaacaatagcaactttgcctggactgctgggaccaaataccatctgaatggaagaaattcattggctaatcctggcatcgctatggcaacacacaaagacgacgaggagcgtttttttcccagtaacgggatcctgatttttggcaaacaaaatgctgccagagacaatgcggattacagcgatgtcatgctcaccagcgaggaagaaatcaaaaccactaaccctgtggctacagaggaatacggtatcgtggcagataacttgcagcagcaaaacacggctcctcaaattggaactgtcaacagccagggggccttacccggtatggtctggcagaaccgggacgtgtacctgcagggtcccatctgggccaagattcctcacacggacggcaacttccacccgtctccgctgatgggcggctttggcctgaaacatcctccgcctcagatcctgatcaagaacacgcctgtacctgcggatcctccgaccaccttcaaccagtcaaagctgaactctttcatcacgcaatacagcaccggacaggtcagcgtggagatcgagtgggagctgcagaaggaaaacagcaagcgctggaacccggagatccagtacacttccaactattacaagtctaataatgttgaatttgctgttaatactgaaggtgtatatagtgaaccccgccccattggcaccagatacctgactcgtaatctgtaa

SEQ ID NO: 346 - protein, 736 aa, Artificial Sequence
  Description of Artificial Sequence: Synthetic polypeptide
MAADGYLPDWLEDNLSEGIREWWALKPGAPQPKANQQHQDNARGLVLPGYKYLGPGNGLDKGEPVNAADAAALEHDKAYDQQLQAGDNPYLRYNHADAEFQERLQEDTSFGGNLGRAVFQAKKRILEPLGLVEEAAKTAPGKKRPVDQSPQEPDSSSGVGKSGKQPARKRLNFGQTGDSESVPDPQPLGEPPAAPTSLGSNTMASGGGAPMADNNEGADGVGSSSGNWHCDSQLGDRVITTSTRTWALPTYNNHLYKQISNGTSGGATNDNTYFGYSTPWGYFDFNRFHCHFSPRDWQRLINNNWGFRPKRLSFKLFNIQVKEVTQNEGTKTIANNLTSTIQVFTDSEYQLPYVLGSAHQGCLPPFPADVFMIPQYGYLTLNNGSQAVGRSSFYCLEYFPSQMLRTGNNFTFSYTFEEVPFHSSYAHSQSLDRLMNPLIDQYLYYLSRTQTTGGTANTQTLGFSQGGPNTMANQAKNWLPGPCYRQQRVSTTTGQNNNSNFAWTAGTKYHLNGRNSLANPGIAMATHKDDEERFFPSNGILIFGKQNAARDNADYSDVMLTSEEEIKTTNPVATEEYGIVADNLQQQNTAPQIGTVNSQGALPGMVWQNRDVYLQGPIWAKIPHTDGNFHPSPLMGGFGLKHPPPQILIKNTPVPADPPTTFNQSKLNSFITQYSTGQVSVEIEWELQKENSKRWNPEIQYTSNYYKSNNVEFAVNTEGVYSEPRPIGTRYLTRNL

SEQ ID NO: 347 - DNA, 2214 bp, Artificial Sequence
  Description of Artificial Sequence: Synthetic polynucleotide
atggctgccgatggttatcttccagattggctcgaggacaaccttagtgaaggaattcgcgagtggtgggctttgaaacctggagcccctcaacccaaggcaaatcaacaacatcaagacaacgctcgaggtcttgtgcttccgggttacaaataccttggacccggcaacggactcgacaagggggagccggtcaacgcagcagacgcggcggccctcgagcacgacaaggcctacgaccagcagctgcaggcgggtgacaatccgtacctgcggtataaccacgccgacgccgagtttcaggagcgtctgcaagaagatacgtcttttgggggcaaccttggcagagcagtcttccaggccaaaaagaggatccttgagcctcttggtctggttgaggaagcagctaaaacggctcctggaaagaagaggcctgtagatcagtctcctcaggaaccggactcatcatctggtgttggcaaatcgggcaaacagcctgccagaaaaagactaaatttcggtcagactggcgactcagagtcagtcccagaccctcaacctctcggagaaccaccagcagcccccacaagtttgggatctaatacaatggcttcaggcggtggcgcaccaatggcagacaataacgagggtgccgatggggtgggtagttcctcgggaaattggcattgcgattcccaatggctgggggacagagtcatcaccaccagcacccgaacctgggccctgcccacctacaacaatcacctctacaagcaaatctccaacgggacatcgggaggagccaccaacgacaacacctacttcggctacagcaccccctgggggtattttgactttaacagattccactgccacttttcaccacgtgactggcagcgactcatcaacaacaactggggattccggcccaagagactcagcttcaagctcttcaacatccaggtcaaggaggtcacgcagaatgaaggcaccaagaccatcgccaataacctcaccagcaccatccaggtgtttacggactcggagtaccagctgccgtacgttctcggctctgcgcaccagggctgcctccctccgttcccggcggacgtgttcatgattccgcaatacggctacctgacgctcaacaatggcagccaagccgtgggacgttcatccttttactgcctggaatatttcccttctcagatgctgagaacgggcaacaactttaccttcagctacacctttgaggaagtgccttttcacagcagctacgcgcacagccagagcttggaccggctgatgaatcctctgattgaccagtacctgtactacttgtctcggactcaaacaacaggaggcacggcaaatacgcagactctgggcttcagccaaggtgggcctaatacaatggccaatcaggcaaagaactggctgccaggaccctgttaccgccaacaacgcgtctcaacgacaaccgggcaaaacaacaatagcaactttgcctggactgctgggaccaaataccatctgaatggaagaaattcattggctaatcctggcatcgctatggcaacacacaaagacgacgaggagcgtttttttcccagtaacgggatcctgatttttggcaaacaaaatgctgccagagacaatgcggattacagcgatgtcatgctcaccagcgaggaagaaatcaaaaccactaaccctgtggctacagaggaatacggtatcgtggcagataacttgcagcagcaaaacacggctcctcaaattggaactgtcaacagccagggggccttacccggtatggtctggcagaaccgggacgtgtacctgcagggtcccatctgggccaagattcctcacacggacggcaacttccacccgtctccgctgatgggcggctttggcctgaaacatcctccgcctcagatcctgatcaagaacacgcctgtacctgcggatcctccgaccaccttcaaccagtcaaagctgaactctttcatcacgcaatacagcaccggacaggtcagcgtggagatcgagtgggagctgcagaaggaaaacagcaagcgctggaacccggagatccagtacacttccaactattacaagtctaataatgttgaatttgctgttaatactgaaggtgtatatagtgaaccccgccccattggcaccagatacctgactcgtaatctgtaa

SEQ ID NO: 348 - protein, 737 aa, Artificial Sequence; identical to SEQ ID NO: 336
  Description of Artificial Sequence: Synthetic polypeptide

SEQ ID NO: 349 - DNA, 2211 bp, Artificial Sequence
  Description of Artificial Sequence: Synthetic polynucleotide
atggctgccgatggttatcttccagattggctcgaggacaacctctctgagggcattcgcgagtggtgggacttgaaacctggagcccctaaacccaaggcaaatcaacaacatcaggacaacgctcgaggtcttgtgcttccgggttacaaataccttggacccggcaacggactcgacaagggggagccggtcaacgcagcagacgcggcggccctcgagcacgacaaggcctacgaccagcagctcaaggccggagacaacccgtacctcaagtacaaccacgccgacgccgagttccaggagcggctcaaagaagatacgtcttttgggggcaacctcgggcgagcagtcttccaggccaaaaagaggcttcttgaacctcttggtctggttgaggaagcggctaagacggctcctggaaagaagagaccggtagagccatcaccccagcgttctccagactcctctacgggcatcggcaagaaaggccaacagcccgctaaaaagagactcaattttggtcagactggcgactcagagtcagtccccgacccacaacctctcggagaacctccagcaacccccgctgctgtgggacctactacaatggcttcaggcggtggcgcaccaatggcagacaataacgagggtgccgatggagtgggtaattcctcaggaaattggcattgcgattcccaatggctgggcgacagagtcatcaccaccagcaccagaacctgggccctgcccacttacaacaaccatctctacaagcaaatctccagccaatcaggagcttcaaacgacaaccactactttggctacagcaccccttgggggtattttgactttaacagattccactgccacttttcaccacgtgactggcaaagactcatcaacaacaactggggattccgacccaagagactcaacttcaagctcttcaacatccaagtcaaggaggtcacgacgaatgatggcgtcacgaccatcgctaataaccttaccagcacggttcaagtcttctcggactcggagtaccagttgccgtacgtcctcggctctgcgcaccagggctgcctccctccgttcccggcggacgtgttcatgattccgcagtacggctacctaacgctcaacaatggcagccaagccgtgggacgttcatccttttactgcctggaatatttcccttctcagatgctgagaacgggcaacaactttaccttcagctacacttttgaggacgttcctttccacagcagctacgctcacagccagagtctggaccgtctcatgaatcctctcatcgaccagtacctgtattacttgagcagaacaaacactccaagtggaaccaccacgcagtcaaggcttcagttttctcaggccggagcgagtgacattcgggaccagtctaggaactggcttcctggaccctgttaccgccagcagcgcgtttctaaaacaaaaacagacaacaacaacagcaattttacctggactggtgcttcaaaatataaccttaatgggcgtgaatctataatcaaccctggcactgctatggcctcacacaaagacgacgaagacaagttctttcccatgagcggtgtcatgatttttggaaaagagagcgccggagcttcaaacactgcattggacaatgtcatgattacagacgaagaggaaattaaagccactaaccctgtggccaccgaaagatttgggaccgtggcagtcaatttccagagcagcagcacagaccctgcgaccggagatgtgcatgctatgggagcattacctggcatggtgtggcaagatagagacgtgtacctgcagggtcccatttgggccaaaattcctcacacagatggacactttcacccgtctcctcttatgggcggctttggactcaagaacccgcctcctcagatcctcatcaaaaacacgcctgttcctgcgaatcctccggcggagttttcagctacaaagtttgcttcattcatcacccaatactccacaggacaagtgagtgtggaaattgaatgggagctgcagaaagaaaacagcaagcgctggaatcccgaagtgcagtacacatccaattatgcaaaatctgccaacgttgattttactgtggacaacaatggactttatactgagcctcgccccattggcacccgttaccttacccgtcccctgtaa

SEQ ID NO: 350 - protein, 736 aa, Artificial Sequence
  Description of Artificial Sequence: Synthetic polypeptide
MAADGYLPDWLEDNLSEGIREWWDLKPGAPKPKANQQHQDNARGLVLPGYKYLGPGNGLDKGEPVNAADAAALEHDKAYDQQLKAGDNPYLKYNHADAEFQERLKEDTSFGGNLGRAVFQAKKRLLEPLGLVEEAAKTAPGKKRPVEPSPQRSPDSSTGIGKKGQQPAKKRLNFGQTGDSESVPDPQPLGEPPATPAAVGPTTMASGGGAPMADNNEGADGVGNSSGNWHCDSQWLGDRVITTSTRTWALPTYNNHLYKQISSQSGASNDNHYFGYSTPWGYFDFNRFHCHFSPRDWQRLINNNWGFRPKRLNFKLFNIQVKEVTTNDGVTTIANNLTSTVQVFSDSEYQLPYVLGSAHQGCLPPFPADVFMIPQYGYLTLNNGSQAVGRSSFYCLEYFPSQMLRTGNNFTFSYTFEDVPFHSSYAHSQSLDRLMNPLIDQYLYYLSRTNTPSGTTTQSRLQFSQAGASDIRDQSRNWLPGPCYRQQRVSKTKTDNNNSNFTWTGASKYNLNGRESIINPGTAMASHKDDEDKFFPMSGVMIFGKESAGASNTALDNVMITDEEEIKATNPVATERFGTVAVNFQSSSTDPATGDVHAMGALPGMVWQDRDVYLQGPIWAKIPHTDGHFHPSPLMGGFGLKNPPPQILIKNTPVPANPPAEFSATKFASFITQYSTGQVSVEIEWELQKENSKRWNPEVQYTSNYAKSANVDFTVDNNGLYTEPRPIGTRYLTRPL

SEQ ID NO: 351 - DNA, 2211 bp, Artificial Sequence
  Description of Artificial Sequence: Synthetic polynucleotide
atggctgccgatggttatcttccagattggctcgaggacaaccttagtgaaggaattcgcgagtggtgggcgctgaaacctggagccccgaagcccaaagccaaccagcaaaagcaggacgacggccggggtctggtgcttccgggttacaaatacctcggacccggtaacggactcgacaaaggagagccggtcaacgaggcggacgcggcagccctcgagcacgacaaggcctacgaccagcagctcaaagcgggtgacaatccgtacctgcggtataaccacgccgacgccgagtttcaggagcgtctgcaagaagatacgtcttttgggggcaacctcgggcgagcagtcttccaggccaagaagcgggttctcgaacctctcggtctggttgaggaaggcgctaagacggctcccggaaagaaacgtccggtagagcagtcgccacaagagccagactcctctacgggcatcggcaagaaaggccaacagcccgccagaaaaagactcaatttcggtcagactggcgactcagagtcagttccagaccctcaacctctcggagaacctccagcagcgccctctggtgtgggacctactacaatggcttcaggcggtggcgcaccaatggcagacaataacgaaggcgccgacggagtgggtaatgcctcaggaaattggcattgcgattccacatggctgggcgacagagtcatcaccaccagcacccgaacatgggccttgcccacctataacaaccacctctacaagcaaatctccagtgcttcaacgggggccagcaacgacaacacctacttcggctacagcaccccctgggggtattttgatttcaacagattccactgccatttctcaccacgtgactggcagcgactcatcaacaacaattggggattccggcccaagagactcaacttcaaactcttcaacatccaagtcaaggaggtcacgacgaatgatggcgtcacgaccatcgctaataaccttaccagcacggttcaagtcttctcggactcggagtaccagttgccgtacgtcctcggctctgcgcaccagggctgcctccctccgttcccggcggacgtgttcatgattccgcagtacggctacctaacgctcaacaatggcagccaggcagtgggacggtcatccttttactgcctggaatatttcccatcgcagatgctgagaacgggcaataactttaccttcagctacaccttcgaggacgtgcctttccacagcagctacgcgcacagccagagcctggaccggctgatgaatcctctcatcgaccagtacctgtattacctgaacagaactcagaatcagtccggaagtgcccaaaacaaggacttgctgtttagccgggggtctccagctggcatgtctgttcagcccaaaaactggctacctggaccctgttatcggcagcagcgcgtttctaaaacaaaaacagacaacaacaacagcaattttacctggactggtgcttcaaaatataacctcaatgggcgtgaatccatcatcaaccctggcactgctatggcctcacacaaagacgacgaagacaagttctttcccatgagcggtgtcatgatttttggaaaagagagcgccggagcttcaaacactgcattggacaatgtcatgattacagacgaagaggaaattaaagccactaaccctgtggccaccgaaagatttgggaccgtggcagtcaatttccagagcagcagcacagaccctgcgaccggagatgtgcatgttatgggagccttacctggaatggtgtggcaagacagagacgtatacctgcagggtcctatttgggccaaaattcctcacacagatggacactttcacccgtctcctcttatgggcggctttggactcaagaacccgcctcctcagatcctcatcaaaaacacgcctgttcctgcgaatcctccggcagagttttcggctacaaagtttgcttcattcatcacccagtattccacaggacaagtgagcgtggagattgaatgggagctgcagaaagaaaacagcaaacgctggaatcccgaagtgcagtatacatctaactatgcaaaatctgccaacgttgatttcactgtggacaacaatggactttatactgagcctcgccccattggcacccgttacctcacccgtcccctgtaa

SEQ ID NO: 352 - protein, 736 aa, Artificial Sequence
  Description of Artificial Sequence: Synthetic polypeptide
MAADGYLPDWLEDNLSEGIREWWALKPGAPKPKANQQKQDDGRGLVLPGYKYLGPGNGLDKGEPVNEADAAALEHDKAYDQQLKAGDNPYLRYNHADAEFQERLQEDTSFGGNLGRAVFQAKKRVLEPLGLVEEGAKTAPGKKRPVEQSPQEPDSSTGIGKKGQQPARKRLNFGQTGDSESVPDPQPLGEPPAAPSGVGPTTMASGGGAPMADNNEGADGVGNASGNWHCDSTWLGDRVITTSTRTWALPTYNNHLYKQISSASTGASNDNTYFGYSTPWGYFDFNRFHCHFSPRDWQRLINNNWGFRPKRLNFKLFNIQVKEVTTNDGVTTIANNLTSTVQVFSDSEYQLPYVLGSAHQGCLPPFPADVFMIPQYGYLTLNNGSQAVGRSSFYCLEYFPSQMLRTGNNFTFSYTFEDVPFHSSYAHSQSLDRLMNPLIDQYLYYLNRTQNQSGSAQNKDLLFSRGSPAGMSVQPKNWLPGPCYRQQRVSKTKTDNNNSNFTWTGASKYNLNGRESIINPGTAMASHKDDEDKFFPMSGVMIFGKESAGASNTALDNVMITDEEEIKATNPVATERFGTVAVNFQSSSTDPATGDVHVMGALPGMVWQDRDVYLQGPIWAKIPHTDGHFHPSPLMGGFGLKNPPPQILIKNTPVPANPPAEFSATKFASFITQYSTGQVSVEIEWELQKENSKRWNPEVQYTSNYAKSANVDFTVDNNGLYTEPRPIGTRYLTRPL

SEQ ID NO: 353 - DNA, 2205 bp, Artificial Sequence
  Description of Artificial Sequence: Synthetic polynucleotide
atggctgctgacggttatcttccagattggctcgaggacaacctttctgaaggcattcgtgagtggtgggctctgaaacctggagtccctcaacccaaagcgaaccaacaacaccaggacaaccgtcggggtcttgtgcttccgggttacaaatacctcggacccggtaacggactcgacaaaggagagccggtcaacgaggcggacgcggcagccctcgaacacgacaaggcctacgaccagcagctcaaggccggagacaacccgtacctcaagtacaaccacgccgacgccgagttccaggagcggctcaaagaagatacgtcttttgggggcaacctcgggcgagcagtcttccaggccaaaaagaggcttcttgaacctcttggtctggttgaggaagcggctaagacggctcctggaaagaagaggcctgtagagcagtctcctcaggaaccggactcctccgcgggtattggcaaatcgggtgcacagcccgctaaaaagagactcaatttcggtcagactggcgacacagagtcagtcccagaccctcaaccaatcggagaacctcccgcagccccctcaggtgtgggatctcttacaatggcttcaggtggtggcgcaccagtggcagacaataacgaaggtgccgatggagtgggtagttcctcgggaaattggcattgcgattcccaatggctgggggacagagtcatcaccaccagcacccgaacctgggccctgcccacctacaacaaccacctctacaaacaaatttccagccaatcaggagcctcgaacgacaatcactactttggctacagcaccccttgggggtattttgacttcaacagattccactgccacttttcaccacgtgactggcagcgactcatcaacaacaactggggattccggcccaagagactcagcttcaagctcttcaacatccaggtcaaagaggttacggacaacaatggagtcaagaccatcgccaataaccttaccagcacggtccaggtcttcacggactcagactatcagctcccgtacgtgctcgggtcggctcacgagggctgcctcccgccgttcccagcggacgttttcatgattcctcagtacgggtatctgacgcttaatgatggaagccaggccgtgggtcgttcgtccttttactgcctggaatatttcccgtcgcaaatgctaagaacgggtaacaacttccagttcagctacgagtttgagaacgtacctttccatagcagctacgctcacagccaaagcctggaccgactaatgaatccactcatcgaccaatacttgtactatctctcaaagactattaacggttctggacagaatcaacaaacgctaaaattcagtgtggccggacccagcaacatggctgtccagggaagaaactacatacctggacccagctaccgacaacaacgtgtctcaaccactgtgactcaaaacaacaacagcgaatttgcttggcctggagcttcttcttgggctctcaatggacgtaatagcttgatgaatcctggacctgctatggccagccacaaagaaggagaggaccgtttctttcctttgtctggatctttaatttttggcaaacaaggaactggaagagacaacgtggatgcggacaaagtcatgataaccaacgaagaagaaattaaaactactaacccggtagcaacggagtcctatggacaagtggccacaaaccaccagagtgcccaagcacaggcgcagaccggctgggttcaaaaccaaggaatacttccgggtatggtttggcaggacagagatgtgtacctgcaaggacccatctgggccaagattcctcacacggacggcaacttccacccgtctccgctgatgggcggctttggcctgaaacatcctccgcctcagatcctgatcaagaacacgcctgtacctgcggatcctccgaccaccttcaaccagtcaaagctgaactctttcatcacgcaatacagcaccggacaggtcagcgtggaaattgaatgggagctgcagaaggaaaacagcaagcgctggaatcccgaagtgcagtatacatctaactatgcaaaatctgccaacgttgatttcactgtggacaacaatggactttatactgagcctcgccccattggcacccgttacctcacccgtcccctgtaa

SEQ ID NO: 354 - protein, 734 aa, Artificial Sequence
  Description of Artificial Sequence: Synthetic polypeptide
MAADGYLPDWLEDNLSEGIREWWALKPGVPQPKANQQHQDNRRGLVLPGYKYLGPGNGLDKGEPVNEADAAALEHDKAYDQQLKAGDNPYLKYNHADAEFQERLKEDTSFGGNLGRAVFQAKKRLLEPLGLVEEAAKTAPGKKRPVEQSPQEPDSSAGIGKSGAQPAKKRLNFGQTGDTESVPDPQPIGEPPAAPSGVGSLTMASGGGAPVADNNEGADGVGSSSGNWHCDSQWLGDRVITTSTRTWALPTYNNHLYKQISSQSGASNDNHYFGYSTPWGYFDFNRFHCHFSPRDWQRLINNNWGFRPKRLSFKLFNIQVKEVTDNNGVKTIANNLTSTVQVFTDSDYQLPYVLGSAHEGCLPPFPADVFMIPQYGYLTLNDGSQAVGRSSFYCLEYFPSQMLRTGNNFQFSYEFENVPFHSSYAHSQSLDRLMNPLIDQYLYYLSKTINGSGQNQQTLKFSVAGPSNMAVQGRNYIPGPSYRQQRVSTTVTQNNNSEFAWPGASSWALNGRNSLMNPGPAMASHKEGEDRFFPLSGSLIFGKQGTGRDNVDADKVMITNEEEIKTTNPVATESYGQVATNHQSAQAQAQTGWVQNQGILPGMVWQDRDVYLQGPIWAKIPHTDGNFHPSPLMGGFGLKHPPPQILIKNTPVPADPPTTFNQSKLNSFITQYSTGQVSVEIEWELQKENSKRWNPEVQYTSNYAKSANVDFTVDNNGLYTEPRPIGTRYLTRPL

SEQ ID NO: 355 - DNA, 2211 bp, Artificial Sequence
  Description of Artificial Sequence: Synthetic polynucleotide
atggctgccgatggttatcttccagattggctcgaggacaacctctctgagggcattcgcgagtggtgggcgctgaaacctggagccccgaagcccaaagccaaccagcaaaagcaggacgacggccggggtctggtgcttcctggctacaagtacctcggacccttcaacggactcgacaagggggagcccgtcaacgcggcggacgcagcggccctcgagcacgacaaggcctacgaccagcagctgcaggcgggtgacaatccgtacctgcggtataaccacgccgacgccgagtttcaggagcgtctgcaagaagatacgtcttttgggggcaacctcgggcgagcagtcttccaggccaagaagtgggttctcgaacctctcggtctggttgaggaaggcgctaagacggctcctggaaagaaacgtccggtagagcagtcgccacaagagccagactcctcctcgggcatcggcaagacaggccagcagcccgctaaaaagagactcaattttggtcagactggcgactcagagtcagtccccgacccacaacctctcggagaacctccagcaacccccgctgctgtgggacctactacaatggcttcaggcggtggcgcaccaatggcagacaataacgaaggcgccgacggagtgggtaatgcctcaggaaattggcattgcgattccacatggctgggcgacagagtcatcaccaccagcacccgcacctgggccttgcccacctacaataaccacctctacaagcaaatctccagtgcttcaacgggggccagcaacgacaaccactacttcggctacagcaccccctgggggtattttgatttcaacagattccactgccatttctcaccacgtgactggcagcgactcatcaacaacaattggggattccggcccaagagactcaacttcaagctcttcaacatccaagtcaaggaggtcacgacgaatgatggcgtcacaaccatcgctaataaccttaccagcacggttcaagtcttctcggactcggagtaccagcttccgtacgtcctcggctctgcgcaccagggctgcctccctccgttcccggcggacgtgttcatgattccgcaatacggctacctgacgctcaacaatggcagccaagccgtgggacgttcatccttttactgcctggaatatttcccttctcagatgctgagaacgggcaacaactttaccttcagctacacctttgaggaagtgcctttccacagcagctacgcgcacagccagagcctggaccggctgatgaatcctctcatcgaccaatacctgtattacctgaacagaactcaaaatcagtccggaagtgcccaaaacaaggacttgctgtttagccgtgggtctccagctggcatgtctgttcagcccaaaaactggctacctggaccctgttatcggcagcagcgcgtttctaaaacaaaaacagacaacaacaacagcaattttacctggactggtgcttcaaaatataacctcaatgggcgtgaatccatcatcaaccctggcactgctatggcctcacacaaagacgacgaagacaagttctttcccatgagcggtgtcatgatttttggaaaggagagcgccggagcttcaaacactgcattggacaatgtcatgatcaccgacgaagaggaaatcaaagccactaaccccgtggccaccgaaagatttgggactgtggcagtcaatctccagagcagcagcacagaccctgcgaccggagatgtgcatgttatgggagccttacctggcatggtgtggcaagatagagacgtgtacctgcagggtcccatttgggccaaaattcctcacacagatggacactttcacccgtctcctcttatgggcggctttggactcaagaacccgcctcctcagatcctcatcaaaaacacgcctgttcctgcgaatcctccggcggagttttcagctacaaagtttgcttcattcatcacccaatactccacaggacaagtgagtgtggaaattgaatgggagctgcagaaagaaaacagcaagcgctggaatcccgaagtgcagtacacatccaattatgcaaaatctgccaacgttgattttactgtggacaacaatggactttatactgagcctcgccccattggcacccgttacctcacccgtcccctgtaa

SEQ ID NO: 356 - protein, 736 aa, Artificial Sequence
  Description of Artificial Sequence: Synthetic polypeptide
MAADGYLPDWLEDNLSEGIREWWALKPGAPKPKANQQKQDDGRGLVLPGYKYLGPFNGLDKGEPVNAADAAALEHDKAYDQQLQAGDNPYLRYNHADAEFQERLQEDTSFGGNLGRAVFQAKKWVLEPLGLVEEGAKTAPGKKRPVEQSPQEPDSSSGIGKTGQQPAKKRLNFGQTGDSESVPDPQPLGEPPATPAAVGPTTMASGGGAPMADNNEGADGVGNASGNWHCDSTWLGDRVITTSTRTWALPTYNNHLYKQISSASTGASNDNHYFGYSTPWGYFDFNRFHCHFSPRDWQRLINNNWGFRPKRLNFKLFNIQVKEVTTNDGVTTIANNLTSTVQVFSDSEYQLPYVLGSAHQGCLPPFPADVFMIPQYGYLTLNNGSQAVGRSSFYCLEYFPSQMLRTGNNFTFSYTFEEVPFHSSYAHSQSLDRLMNPLIDQYLYYLNRTQNQSGSAQNKDLLFSRGSPAGMSVQPKNWLPGPCYRQQRVSKTKTDNNNSNFTWTGASKYNLNGRESIINPGTAMASHKDDEDKFFPMSGVMIFGKESAGASNTALDNVMITDEEEIKATNPVATERFGTVAVNLQSSSTDPATGDVHVMGALPGMVWQDRDVYLQGPIWAKIPHTDGHFHPSPLMGGFGLKNPPPQILIKNTPVPANPPAEFSATKFASFITQYSTGQVSVEIEWELQKENSKRWNPEVQYTSNYAKSANVDFTVDNNGLYTEPRPIGTRYLTRPL

SEQ ID NO: 357 - DNA, 2214 bp, Artificial Sequence
  Description of Artificial Sequence: Synthetic polynucleotide
atggctgccgatggttatcttccagattggctcgaggacaaccttagtgaaggaattcgcgagtggtgggctttgaaacctggagcccctcaacccaaggcaaatcaacaacatcaagacaacgctcgaggtcttgtgcttccgggttacaaataccttggacccggcaacggactcgacaagggggagccggtcaacgcagcagacgcggcggccctcgagcacgacaaggcctacgaccagcagctgcaggcgggtgacaatccgtacctgcggtataaccacgccgacgccgagtttcaggagcgtctgcaagaagatacgtcttttgggggcaaccttggcagagcagtcttccaggccaaaaagaggatccttgagcctcttggtctggttgaggaagcagctaaaacggctcctggaaagaagaggcctgtagatcagtctcctcaggaaccggactcatcatctggtgttggcaaatcgggcaaacagcctgccagaaaaagactaaatttcggtcagactggcgactcagagtcagtcccagaccctcaacctctcggagaaccaccagcagcccccacaagtttgggatctaatacaatggcttcaggcggtggcgcaccaatggcagacaataacgagggtgccgatggggtgggtagttcctcgggaaattggcattgcgattcccaatggctgggggacagagtcatcaccaccagcacccgaacctgggccctgcccacctacaacaatcacctctacaagcaaatctccaacgggacatcgggaggagccaccaacgacaacacctacttcggctacagcaccccctgggggtattttgactttaacagattccactgccacttttcaccacgtgactggcagcgactcatcaacaacaactggggattccggcccaagagactcagcttcaagctcttcaacatccaggtcaaggaggtcacgcagaatgaaggcaccaagaccatcgccaataacctcaccagcaccatccaggtgtttacggactcggagtaccagctgccgtacgttctcggctcggcgcaccagggctgcctccctccgttcccggcggacgtcttcatggtgccacagtatggatacctgacgctcaacaatggcagccaagccgtgggacgttcatccttttactgcctggaatatttcccttctcagatgctgagaacgggcaacaactttaccttcagctacacctttgaggaagtgcctttccacagcagctacgcgcacagccagagcttggaccggctgatgaatcctctgattgaccagtacctgtactacttgtctcggactcaaacaacaggaggcacggcaaatacgcagactctgggcttcagccaaggtgggcctaatacaatggccaatcaggcaaagaactggctgccaggaccctgttaccgccaacaacgcgtctcaacgacaaccgggcaaaacaacaatagcaactttgcctggactgctgggaccaaataccatctgaatggaagaaattcattggctaatcctggcatcgctatggcaacacacaaagacgacgaggagcgtttttttcccagtaacgggatcctgatttttggcaaacaaaatgctgccagagacaatgcggattacagcgatgtcatgctcaccagcgaggaagaaatcaaaaccactaaccctgtggctacagaggaatacggtatcgtggcagataacttgcagcagcaaaacacggctcctcaaattggaactgtcaacagccagggggacttacccggtatggtctggcagaaccgggacgtgtacctgcagggtcccatctgggccaagattcctcacacggacggcaacttccacccgtctccgctgatgggcggctttggcctgaaacatcctccgcctcagatcctgatcaagaacacgcctgtacctgcggatcctccgaccaccttcaaccagtcaaagctgaactctttcatcacgcaatacagcaccggacaggtcagcgtggagatcgagtgggagctgcagaaggaaaacagcaagcgctggaacccggagatccagtacacttccaactattacaagtctaataatgttgaatttgctgttaatactgaaggtgtatatagtgaaccccgccccattggcaccagatacctgactcgtaatctgtaa

SEQ ID NO: 358 - protein, 737 aa, Artificial Sequence
  Description of Artificial Sequence: Synthetic polypeptide
MAADGYLPDWLEDNLSEGIREWWALKPGAPQPKANQQHQDNARGLVLPGYKYLGPGNGLDKGEPVNAADAAALEHDKAYDQQLQAGDNPYLRYNHADAEFQERLQEDTSFGGNLGRAVFQAKKRILEPLGLVEEAAKTAPGKKRPVDQSPQEPDSSSGVGKSGKQPARKRLNFGQTGDSESVPDPQPLGEPPAAPTSLGSNTMASGGGAPMADNNEGADGVGSSSGNWHCDSQWLGDRVITTSTRTWALPTYNNHLYKQISNGTSGGATNDNTYFGYSTPWGYFDFNRFHCHFSPRDWQRLINNNWGFRPKRLSFKLFNIQVKEVTQNEGTKTIANNLTSTIQVFTDSEYQLPYVLGSAHQGCLPPFPADVFMVPQYGYLTLNNGSQAVGRSSFYCLEYFPSQMLRTGNNFTFSYTFEEVPFHSSYAHSQSLDRLMNPLIDQYLYYLSRTQTTGGTANTQTLGFSQGGPNTMANQAKNWLPGPCYRQQRVSTTTGQNNNSNFAWTAGTKYHLNGRNSLANPGIAMATHKDDEERFFPSNGILIFGKQNAARDNADYSDVMLTSEEEIKTTNPVATEEYGIVADNLQQQNTAPQIGTVNSQGDLPGMVWQNRDVYLQGPIWAKIPHTDGNFHPSPLMGGFGLKHPPPQILIKNTPVPADPPTTFNQSKLNSFITQYSTGQVSVEIEWELQKENSKRWNPEIQYTSNYYKSNNVEFAVNTEGVYSEPRPIGTRYLTRNL

SEQ ID NO: 359 - DNA, 2205 bp, Artificial Sequence
  Description of Artificial Sequence: Synthetic polynucleotide
atggctgctgacggttatcttccagattggctcgaggacaacctttctgaaggcattcgtgagtggtgggctctgaaacctggagtccctcaacccaaagcgaaccaacaacaccaggacaactgtcggggtcttgtgcttccgggttacaaatacctcggacccggtaacggactcgacaaaggagagccggtcaacgaggcggacgcggcagccctcgaacacgacaaggcctacgaccagcagctcaaggccggagacaacccgtacctcaagtacaaccacgccgacgccgagttccaggagcggctcaaagaagatacgtcttttgggggcaacctcgggcgagcagtcttccagaccaaaaagaggcttcttgaacctcttggtctggttgaggaagcggctaagacggctcctggaaagaagaggcctgtagagcagtctcctcaggaaccggactcctccgcgggtattggcaaatcgggtgcacagcccgctaaaaagagactcaatttcggtcagactggcgacacagagtcagtcccagaccctcaaccaatcggagaacctcccgcagccccctcaggtgtgggatctcttacaatggcttcaggtggtggcgcaccagtggcagacaataacgaaggtgccgatggagtgggtagttcctcgggaaattggcattgcgattcccaatggctgggggacagagtcatcaccaccagcacccgaacctgggccctgcccacctacaacaaccacctctacaaacaaatttccagccaatcaggagcctcgaacgacaatcactactttggctacagcaccccttgggggtattttgacttcaacagattccactgccacttttcaccacgtgactggcagcgactcatcaacaacaactggggattccggcccaagagactcagcttcaagctcttcaacatccaggtcaaagaggttacggacaacaatggagtcaagaccatcgccaataaccttaccagcacggtccaggtcttcacggactcagactatcagctcccgtacgtgctcgggtcggctcacgagggctgcctcccgccgttcccagcggacgttttcatgattcctcagtacgggtatctgacgcttaatgatggaagccaggccgtgggtcgttcgtccttttactgcctggaatatttcccgtcgcaaatgctaagaacgggtaacaacttccagttcagctacgagtttgagaacgtacctttccatagcagctacgctcacagccaaagcctggaccgactaatgaatccactcatcgaccaatacttgtactatctctcaaagactattaacggttctggacagaatcaacaaacgctaaaattcagtgtggccggacccagcaacatggctgtccagggaagaaactacatacctggacccagctaccgacaacaacgtgtctcaaccactgtgactcaaaacaacaacagcgaatttgcttggcctggagcttcttcttgggctctcaatggacgtaatagcttgatgaatcctggacctgctatggccagccacaaagaaggagaggaccgtttctttcctttgtctggatctttaatttttggcaaacaaggaactggaagagacaacgtggatgcggacaaagtcatgataaccaacgaagaagaaattaaaactactaacccggtagcaacggagtcctatggacaagtggccacaaaccaccagagtgcccaagcacaggcgcagaccggctgggttcaaaaccaaggaatacttccgggtatggtttggcaggacagagatgtgtacctgcaaggacccatctgggccaagattcctcacacggacggcaacttccacccgtctccgctgatgggcggctttggcctgaaacatcctccgcctcagatcctgatcaagaacacgcctgttcctgcgaatcctccggcggagttttcagctacaaagtttgcttcattcatcacccagtactccacaggacaagtgagtgtggaaattgaatgggagctgcagaaagaaaacagcaagcgctggaatcccgaagtgcagtacacatccaattatgcaaaatctgccaacgttgattttactgtggacaacaatggactttatactgagcctcgccccattggcacccgttaccttaccaaacctctgtaa

SEQ ID NO: 360 - protein, 734 aa, Artificial Sequence
  Description of Artificial Sequence: Synthetic polypeptide
MAADGYLPDWLEDNLSEGIREWWALKPGVPQPKANQQHQDNCRGLVLPGYKYLGPGNGLDKGEPVNEADAAALEHDKAYDQQLKAGDNPYLKYNHADAEFQERLKEDTSFGGNLGRAVFQTKKRLLEPLGLVEEAAKTAPGKKRPVEQSPQEPDSSAGIGKSGAQPAKKRLNFGQTGDTESVPDPQPIGEPPAAPSGVGSLTMASGGGAPVADNNEGADGVGSSSGNWHCDSQWLGDRVITTSTRTWALPTYNNHLYKQISSQSGASNDNHYFGYSTPWGYFDFNRFHCHFSPRDWQRLINNNWGFRPKRLSFKLFNIQVKEVTDNNGVKTIANNLTSTVQVFTDSDYQLPYVLGSAHEGCLPPFPADVFMIPQYGYLTLNDGSQAVGRSSFYCLEYFPSQMLRTGNNFQFSYEFENVPFHSSYAHSQSLDRLMNPLIDQYLYYLSKTINGSGQNQQTLKFSVAGPSNMAVQGRNYIPGPSYRQQRVSTTVTQNNNSEFAWPGASSWALNGRNSLMNPGPAMASHKEGEDRFFPLSGSLIFGKQGTGRDNVDADKVMITNEEEIKTTNPVATESYGQVATNHQSAQAQAQTGWVQNQGILPGMVWQDRDVYLQGPIWAKIPHTDGNFHPSPLMGGFGLKHPPPQILIKNTPVPANPPAEFSATKFASFITQYSTGQVSVEIEWELQKENSKRWNPEVQYTSNYAKSANVDFTVDNNGLYTEPRPIGTRYLTKPL

SEQ ID NO: 361 - DNA, 2211 bp, Artificial Sequence
  Description of Artificial Sequence: Synthetic polynucleotide
atggctgccgatggttatcttccagattggctcgaggacaacctctctgagggcattcgcgagtggtgggacttgaaacctggagcccctaaacccaaggcaaatcaacaacatcaggacaacgctcgaggtcttgtgcttccgggttacaaataccttggacccggcaacggactcgacaagggggagccggtcaacgcagcagacgcggcggccctcgagcacgacaaggcctacgaccagcagctcaaggccggagacaacccgtacctcaagtacaaccacgccgacgccgagttccaggagcggctcaaagaagatacgtcttttgggggcaacctcgggcgagcagtcttccaggccaaaaagaggcttcttgaacctcttggtctggttgaggaagcggctaagacggctcctggaaagaagagaccggtagagccatcaccccagcgttctccagactcctctacgggcatcggcaagaaaggccaacagcccgctaaaaagagactcaattttggtcagactggcgactcagagtcagtccccgacccacaacctctcggagaacctccagcaacccccgctgctgtgggacctactacaatggcttcaggcggtggcgcaccaatggcagacaataacgagggtgccgatggagtgggtaattcctcaggaaattggcattgcgattcccaatggctgggcgacagagtcatcaccaccagcaccagaacctgggccctgcccacttacaacaaccatctctacaagcaaatctccagccaatcaggagcttcaaacgacaaccactactttggctacagcaccccttgggggtattttgactttaacagattccactgccacttttcaccacgtgactggcaaagactcatcaacaacaactggggattccgacccaagagactcaacttcaagctcttcaacatccaagtcaaggaggtcacgacgaatgatggcgtcacgaccatcgctaataaccttaccagcacggttcaagtcttctcggactcggagtaccagttgccgtacgtcctcggctctgcgcaccagggctgcctccctccgttcccggcggacgtgttcatgattccgcagtacggctacctaacgctcaacaatggcagccaagccgtgggacgttcatccttttactgcctggaatatttcccttctcagatgctgagaacgggcaacaactttaccttcagctacacttttgaggacgttcctttccacagcagctacgctcacagccagagtctggaccgtctcatgaatcctctcatcgaccagtacctgtattacttgagcagaacaaacactccaagtggaaccaccacgcagtcaaggcttcagttttctcaggccggagcgagtgacattcgggaccagtctaggaactggcttcctggaccctgttaccgccagcagcgcgtttctaaaacaaaaacagacaacaacaacagcaattttacctggactggtgcttcaaaatataaccttaatgggcgtgaatctataatcaaccctggcactgctatggcctcacacaaagacgacgaagacaagttctttcccatgagcggtgtcatgatttttggaaaagagagcgccggagcttcaaacactgcattggacaatgtcatgatcacagacgaagaggaaatcaaagccactaaccccgtggccaccgaaagatttgggactgtggcagtcaatctccagagcagcagcacagaccctgcgaccggagatgtgcatgttatgggagcattacctggcatggtgtggcaagatagagacgtgtacctgcagggtcccatttgggccaaaattcctcacacagatggacactttcacccgtctcctcttatgggcggctttggactcaagaacccgcctcctcagatcctcatcaaaaacacgcctgttcctgcgaatcctccggcggagttttcagctacaaagtttgcttcattcatcacccaatactccacaggacaagtgagtgtggaaattgaatgggagctgcagaaagaaaacagcaagcgctggaatcccgaagtgcagtacacatccaattatgcaaaatctgccaacgttgattttactgtggacaacaatggactttatactgagcctcgccccattggcacccgttaccttacccgtcccctgtaa

SEQ ID NO: 362 - protein, 736 aa, Artificial Sequence
  Description of Artificial Sequence: Synthetic polypeptide
MAADGYLPDWLEDNLSEGIREWWDLKPGAPKPKANQQHQDNARGLVLPGYKYLGPGNGLDKGEPVNAADAAALEHDKAYDQQLKAGDNPYLKYNHADAEFQERLKEDTSFGGNLGRAVFQAKKRLLEPLGLVEEAAKTAPGKKRPVEPSPQRSPDSSTGIGKKGQQPAKKRLNFGQTGDSESVPDPQPLGEPPATPAAVGPTTMASGGGAPMADNNEGADGVGNSSGNWHCDSQWLGDRVITTSTRTWALPTYNNHLYKQISSQSGASNDNHYFGYSTPWGYFDFNRFHCHFSPRDWQRLINNNWGFRPKRLNFKLFNIQVKEVTTNDGVTTIANNLTSTVQVFSDSEYQLPYVLGSAHQGCLPPFPADVFMIPQYGYLTLNNGSQAVGRSSFYCLEYFPSQMLRTGNNFTFSYTFEDVPFHSSYAHSQSLDRLMNPLIDQYLYYLSRTNTPSGTTTQSRLQFSQAGASDIRDQSRNWLPGPCYRQQRVSKTKTDNNNSNFTWTGASKYNLNGRESIINPGTAMASHKDDEDKFFPMSGVMIFGKESAGASNTALDNVMITDEEEIKATNPVATERFGTVAVNLQSSSTDPATGDVHVMGALPGMVWQDRDVYLQGPIWAKIPHTDGHFHPSPLMGGFGLKNPPPQILIKNTPVPANPPAEFSATKFASFITQYSTGQVSVEIEWELQKENSKRWNPEVQYTSNYAKSANVDFTVDNNGLYTEPRPIGTRYLTRPL

SEQ ID NO: 363 - DNA, 2214 bp, Artificial Sequence; identical to SEQ ID NO: 335
  Description of Artificial Sequence: Synthetic polynucleotide

SEQ ID NO: 364 - protein, 737 aa, Artificial Sequence; identical to SEQ ID NO: 336
  Description of Artificial Sequence: Synthetic polypeptide

SEQ ID NO: 365 - DNA, 2205 bp, Artificial Sequence
  Description of Artificial Sequence: Synthetic polynucleotide
atggctgctgacggttatcttccagattggctcgaggacaacctttctgaaggcattcgtgagtggtgggctctgaaacctggagtccctcaacccaaagcgaaccaacaacaccaggacaaccgtcggggtcttgtgcttccgggttacaaatacctcggacccggtaacggactcgacaaaggagagccggtcaacgaggcggacgcggcagccctcgaacacgacaaggcctacgaccagcagctcaaggccggagacaacccgtacctcaagtacaaccacgccgacgccgagttccaggagcggctcaaagaagatacgtcttttgggggcaacctcgggcgagcagtcttccaggccaaaaagaggcttcttgaacctcttggtctggttgaggaagcggctaagacggctcctggaaagaagaggcctgtagagcagtctcctcaggaaccggactcctccgcgggtattggcaaatcgggtgcacagcccgctaaaaagagactcaatttcggtcagactggcgacacagagtcagtcccagaccctcaaccaatcggagaacctcccgcagccccctcaggtgtgggatctcttacaatggcttcaggtggtggcgcaccagtggcagacaataacgaaggtgccgatggagtgggtagttcctcgggaaattggcattgcgattcccaatggctgggggacagagtcatcaccaccagcacccgaacctgggccctgcccacctacaacaaccacctctacaaacaaatttccagccaatcaggagcctcgaacgacaatcactactttggctacagcaccccttgggggtattttgacttcaacagattccactgccacttttcaccacgtgactggcagcgactcatcaacaacaactggggattccggcccaagagactcagcttcaagctcttcaacatccaggtcaaagaggttacggacaacaatggagtcaagaccatcgccaataaccttaccagcacggtccaggtcttcacggactcagactatcagctcccgtacgtgctcgggtcggctcacgagggctgcctcccgccgttcccagcggacgttttcatgattcctcagtacgggtatctgacgcttaatgatggaagccaggccgtgggtcgttcgtccttttactgcctggaatatttcccgtcgcaaatgctaagaacgggtaacaacttccagttcagctacgagtttgagaacgtacctttccatagcagctacgctcacagccaaagcctggaccgactaatgaatccactcatcgaccaatacttgtactatctctcaaagactattaacggttctggacagaatcaacaaacgctaaaattcagtgtggccggacccagcaacatggctgtccagggaagaaactacatacctggacccagctaccgacaacaacgtgtctcaaccactgtgactcaaaacaacaacagcgaatttgcttggcctggagcttcttcttgggctctcaatggacgtaatagcttgatgaatcctggacctgctatggccagccacaaagaaggagaggaccgtttctttcctttgtctggatctttaatttttggcaaacaaggaactggaagagacaacgtggatgcggacaaagtcatgataaccaacgaagaagaaattaaaactactaacccggtagcaacggagtcctatggacaagtggccacaaaccaccagagtgcccaagcacaggcgcagaccggctgggttcaaaaccaaggaatacttccgggtatggtttggcaggacagagatgtgtacctgcaaggacccatttgggccaaaattcctcacacggacggcaactttcacccttctccgctgatgggagggtttggaatgaaacacccgcctcctcagatcctcatcaaaaacacacctgtacctgcggatcctccaacggccttcaacaaggacaagctgaactctttcatcacccagtattctactggccaagtcagcgtggagatcgagtgggagctgcagaaggaaaacagcaagcgctggaaccccgagatccagtacacctccaactactacaaatctacaagtgtggactttgctgttaatacagaaggcgtgtactctgaaccccgccccattggcacccgttacctcacccgtaatctgtaa

SEQ ID NO: 366 - protein, 734 aa, Artificial Sequence
  Description of Artificial Sequence: Synthetic polypeptide
MAADGYLPDWLEDNLSEGIREWWALKPGVPQPKANQQHQDNRRGLVLPGYKYLGPGNGLDKGEPVNEADAAALEHDKAYDQQLKAGDNPYLKYNHADAEFQERLKEDTSFGGNLGRAVFQAKKRLLEPLGLVEEAAKTAPGKKRPVEQSPQEPDSSAGIGKSGAQPAKKRLNFGQTGDTESVPDPQPIGEPPAAPSGVGSLTMASGGGAPVADNNEGADGVGSSSGNWHCDSQWLGDRVITTSTRTWALPTYNNHLYKQISSQSGASNDNHYFGYSTPWGYFDFNRFHCHFSPRDWQRLINNNWGFRPKRLSFKLFNIQVKEVTDNNGVKTIANNLTSTVQVFTDSDYQLPYVLGSAHEGCLPPFPADVFMIPQYGYLTLNDGSQAVGRSSFYCLEYFPSQMLRTGNNFQFSYEFENVPFHSSYAHSQSLDRLMNPLIDQYLYYLSKTINGSGQNQQTLKFSVAGPSNMAVQGRNYIPGPSYRQQRVSTTVTQNNNSEFAWPGASSWALNGRNSLMNPGPAMASHKEGEDRFFPLSGSLIFGKQGTGRDNVDADKVMITNEEEIKTTNPVATESYGQVATNHQSAQAQAQTGWVQNQGILPGMVWQDRDVYLQGPIWAKIPHTDGNFHPSPLMGGFGMKHPPPQILIKNTPVPADPPTAFNKDKLNSFITQYSTGQVSVEIEWELQKENSKRWNPEIQYTSNYYKSTSVDFAVNTEGVYSEPRPIGTRYLTRNL

SEQ ID NO: 367 - DNA, 2217 bp, Artificial Sequence
  Description of Artificial Sequence: Synthetic polynucleotide
atggctgccgatggttatcttccagattggctcgaggacaacctctctgagggcattcgcgagtggtgggcgctgaaacctggagccccgaagcccaaagccaaccagcaaaagcaggacgacggccggggtctggtgcttcctggctacaagtacctcggacccttcaacggactcgacaagggggagcccgtcaacgcggcggacgcagcggccctcgagcacgacaaggcctacgaccagcagctgcaggcgggtgacaatccgtacctgcggtataaccacgccgacgccgagtttcaggagcgtctgcaagaagatacgtcttttgggggcaacctcgggcgagcagtcttccaggccaagaagcgggttctcgaacctctcggtctggttgaggaaggcgctaagacggctcctggaaagaagagaccggtagagccatcaccccagcgttctccagactcctctacgggcatcggcaagaaaggccaacagcccgccagaaaaagactcaattttggtcagactggcgactcagagtcagttccagaccctcaacctctcggagaacctccagcagcgccctctggtgtgggacctaatacaatggctgcaggcggtggcgcaccaatggcagacaataacgaaggcgccgacggagtgggtagttcctcgggaaattggcattgcgattccacatggctgggcgacagagtcatcaccaccagcacccgaacctgggccctgcccacctacaacaaccacctctacaagcaaatctccaacgggacatcgggaggagccaccaacgacaacacctacttcggctacagcaccccctgggggtattttgactttaacagattccactgccacttttcaccacgtgactggcagcgactcatcaacaacaactggggattccggcccaagagactcagcttcaagctcttcaacatccaggtcaaggaggtcacgcagaatgaaggcaccaagaccatcgccaataacctcaccagcaccatccaggtgtttacggactcggagtaccagctgccgtacgttctcggctctgcccaccagggctgcctgcctccgttcccggcggacgtgttcatgattccccagtacggctacctaacactcaacaacggtagtcaggccgtgggacgctcctccttctactgcctggaatactttccttcgcagatgctgagaaccggcaacaacttccagtttacttacaccttcgaggacgtgcctttccacagcagctacgcccacagccagagcttggaccggctgatgaatcctctgattgaccagtacctgtactacttgtctcggactcaaacaacaggaggcacggcaaatacgcagactctgggcttcagccaaggtgggcctaatacaatggccaatcaggcaaagaactggctgccaggaccctgttaccgccaacaacgcgtctcaacgacaaccgggcaaaacaacaatagcaactttgcctggactgctgggaccaaataccatctgaatggaagaaattcattggctaatcctggcatcgctatggcaacacacaaagacgacgaggagcgtttttttcccagtaacgggatcctgatttttggcaaacaaaatgctgccagagacaatgcggattacagcgatgtcatgctcaccagcgaggaagaaatcaaaaccactaaccctgtggctacagaggaatacggtatcgtggcagataacttgcagcagcaaaacacggctcctcaaattggaactgtcaacagccagggggccttacccggtatggtctggcagaaccgggacgtgtacctgcagggtcccatctgggccaagattcctcacacggacggcaacttccacccctctcccctcatgggtggattcggacttaaacatcctccgcctcagatcctgatcaagaacacgcctgtacctgcggatcctccgaccaccttcaaccagtcaaagctgaactctttcatcacgcaatacagcaccggacaggtcagcgtggaaattgaatgggagctgcagaaggaaaacagcaagcgctggaaccccgagatccagtacacctccaactactacaaatctacaagtgtggactttgctgttaatacagaaggcgtgtactctgaaccccgccccattggcacccgttacctcacccgtaatctgtaa

SEQ ID NO: 368 - protein, 738 aa, Artificial Sequence; identical to SEQ ID NO: 114
  Description of Artificial Sequence: Synthetic polypeptide

SEQ ID NO: 369 - DNA, 2211 bp, Artificial Sequence
  Description of Artificial Sequence: Synthetic polynucleotide
atggctgctgacggttatcttccagattggctcgaggacaacctttctgaaggcattcgagagtggtgggcgctgcaacctggagcccctaaacccaaggcaaatcaacaacatcaggacaacgctcggggtcttgtgcttccgggttacaaatacctcggacccggcaacggactcgacaagggggaacccgtcaacgcagcggacgcggcagccctcgagcacgacaaggcctacgaccagcagctcaaggccggtgacaacccctacctcaagtacaaccacgccgacgccgagttccaggagcggctcaaagaagatacgtcttttgggggcaacctcgggcgagcagtcttccaggccaaaaagaggcttcttgaacctcttggtctggttgaggaagcggctaagacggctcctggaaagaagaggcctgtagatcagtctcctcaggaaccggactcatcatctggtgttggcaaatcgggcaaacagcctgccagaaaaagactaaatttcggtcagactggcgactcagagtcagtcccagaccctcaacctctcggagaaccaccagcagcccccacaagtttgggatctaatacaatggcttcaggcggtggcgcaccaatggcagacaataacgagggtgccgatggagtgggtaattcctcaggaaattggcattgcgattcccaatggctgggcgacagagtcatcaccaccagcaccagaacctgggccctgcccacttacaacaaccatctctacaagcaaatctccagccaatcaggagcttcaaacgacaaccactactttggctacagcaccccttgggggtattttgactttaacagattccactgccacttctcaccacgtgactggcagcgactcattaacaacaactggggattccggcccaagaaactcagcttcaagctcttcaacatccaagttaaagaggtcacgcagaacgatggcacgacgactattgccaataaccttaccagcacggttcaggtgtttacggactcggagtatcagctcccgtacgtgctcgggtcggcgcaccaaggctgtctcccgccgtttccagcggacgtcttcatggtccctcagtatggatacctcaccctgaacaacggaagtcaagcggtgggacgctcatccttttactgcctggagtacttcccttcgcagatgctaaggactggaaataacttccaattcagctataccttcgaggatgtaccttttcacagcagctacgctcacagccagagtttggatcgcttgatgaatcctcttattgatcagtatctgtactacctgaacagaacgcaaggaacaacctctggaacaaccaaccaatcacggctgctttttagccaggctgggcctcagtctatgtctttgcaggccagaaattggctacctgggccctgctaccggcaacagagactttcaaagactgctaacgacaacaacaacagtaactttccttggacagcggccagcaaatatcatctcaatggccgcgactcgctggtgaatccaggaccagctatggccagtcacaaggacgatgaagaaaaatttttccctatgcacggcaatctaatatttggcaaagaagggacaacggcaagtaacgcagaattagataatgtaatgattacggatgaagaagagattcgtaccaccaatcctgtggcaacagagcagtatggaactgtggcaaataacttgcagagctcaaatacagctcccacgactagaactgtcaatgatcagggggccttacctggcatggtgtggcaagatcgtgacgtgtaccttcaaggacctatctgggcaaagattcctcacacggatggacactttcatccttctcctctgatgggaggctttggactgaaacatccgcctcctcaaatcatgatcaaaaatactccggtaccggcaaatcctccgacgactttcagcccggccaagtttgcttcatttatcactcagtactccactggacaggtcagcgtggaaattgagtgggagctacagaaagaaaacagcaaacgttggaatccagagattcagtacacttccaactacaacaagtctgttaatgtggactttactgtagacactaatggtgtttatagtgaacctcgccccattggcacccgttaccttacccgtcccctgtaa

SEQ ID NO: 370 - protein, 736 aa, Artificial Sequence; identical to SEQ ID NO: 340
  Description of Artificial Sequence: Synthetic polypeptide

SEQ ID NO: 371 - DNA, 2211 bp, Artificial Sequence; identical to SEQ ID NO: 339
  Description of Artificial Sequence: Synthetic polynucleotide

SEQ ID NO: 372 - protein, 736 aa, Artificial Sequence; identical to SEQ ID NO: 340
  Description of Artificial Sequence: Synthetic polypeptide

SEQ ID NO: 373 - DNA, 2211 bp, Artificial Sequence
  Description of Artificial Sequence: Synthetic polynucleotide
atggctgctgacggttatcttccagattggctcgaggacaacctttctgaaggcattcgtgagtggtgggctctgaaacctggagtccctcaacccaaagcgaaccaacaacaccaggacaaccgtcggggtcttgtgcttccgggttacaaatacctcggacccggtaacggactcgacaaaggagagcccgtcaacgcggcggatgcagcggccctcgagcacgacaaggcctacgaccagcagctcaaagcgggtgacaatccgtacctgcggtataaccacgccgacgccgagtttcaggagcgtctgcaagaagatacgtcttttgggggcaacctcgggcgagcagtcttccaggccaagaagagggttctcgaaccttttggtctggttgaggaaggtgctaagacggctcctggaaagaaacgtccggtagagcagtcgccacaagagccagactcctcctcgggcatcggcaagacaggccagcagcccgctaaaaagagactcaattttggtcagactggcgactcagagtcagtccccgacccacaacctctcggagaacctccagcaacccccgctgctgtgggacctactacaatggcttcaggcggtggcgcaccaatggcagacaataacgaaggcgccgacggagtgggtaatgcctcaggaaattggcattgcgattccacatggctgggcgacagagtcatcaccaccagcacccgcacctgggccttgcccacctacaataaccacctctacaagcaaatctccagtgcttcaacgggggccagcaacgacaaccactacttcggctacagcaccccctgggggtattttgatttcaacagattccactgccatttctcaccacgtgactggcagcgactcatcaacaacaattggggattccggcccaagagactcaacttcaagctcttcaacatccaagtcaaggaggtcacgacgaatgatggcgtcacgaccatcgctaataaccttaccagcacggttcaagtcttctcggactcggagtaccagcttccgtacgtcctcggctctgcgcaccagggctgcctccctccgttcccggcggacgtgttcatgattccgcaatacggctacctgacgctcaacaatggcagccaagccgtgggacgttcatccttttactgcctggaatatttcccttctcagatgctgagaacgggcaacaactttaccttcagctacacctttgaggaagtgcctttccacagcagctacgcgcacagccagagcctggaccggctgatgaatcctctcatcgaccaatacctgtattacctgaacagaactcaaaatcagtccggaagtgcccaaaacaaggacttgctgtttagccgtgggtctccagctggcatgtctgttcagcccaaaaactggctacctggaccctgttatcggcagcagcgcgtttctaaaacaaaaacagacaacaacaacagcaattttacctggactggtgcttcaaaatataacctcaatgggcgtgaatccatcatcaaccctggcactgctatggcctcacacaaagacgacgaagacaagttctttcccatgagcggtgtcatgatttttggaaaagagagcgccggagcttcaaacactgcattggacaatgtcatgattacagacgaagaggaaattaaagccactaaccctgtggccaccgaaagatttgggaccgtggcagtcaatttccagagcagcagcacagaccctgcgaccggagatgtgcatgttatgggagccttacctggaatggtgtggcaagacagagacgtatacctgcagggtcctatttgggccaaaattcctcacacggatggacactttcacccgtctcctctcatgggcggctttggacttaagcacccgcctcctcagatcctcatcaaaaacacgcctgttcctgcgaatcctccggcagagttttcggctacaaagtttgcttcattcatcacccagtattccacaggacaagtgagcgtggagattgaatgggagctgcagaaagaaaacagcaaacgctggaatcccgaagtgcagtatacatctaactatgcaaaatctgccaacgttgatttcactgtggacaacaatggactttatactgagcctcgccccattggcacccgttacctcacccgtcccctgtaa

SEQ ID NO: 374 - protein, 736 aa, Artificial Sequence
  Description of Artificial Sequence: Synthetic polypeptide
MAADGYLPDWLEDNLSEGIREWWALKPGVPQPKANQQHQDNRRGLVLPGYKYLGPGNGLDKGEPVNAADAAALEHDKAYDQQLKAGDNPYLRYNHADAEFQERLQEDTSFGGNLGRAVFQAKKRVLEPFGLVEEGAKTAPGKKRPVEQSPQEPDSSSGIGKTGQQPAKKRLNFGQTGDSESVPDPQPLGEPPATPAAVGPTTMASGGGAPMADNNEGADGVGNASGNWHCDSTWLGDRVITTSTRTWALPTYNNHLYKQISSASTGASNDNHYFGYSTPWGYFDFNRFHCHFSPRDWQRLINNNWGFRPKRLNFKLFNIQVKEVTTNDGVTTIANNLTSTVQVFSDSEYQLPYVLGSAHQGCLPPFPADVFMIPQYGYLTLNNGSQAVGRSSFYCLEYFPSQMLRTGNNFTFSYTFEEVPFHSSYAHSQSLDRLMNPLIDQYLYYLNRTQNQSGSAQNKDLLFSRGSPAGMSVQPKNWLPGPCYRQQRVSKTKTDNNNSNFTWTGASKYNLNGRESIINPGTAMASHKDDEDKFFPMSGVMIFGKESAGASNTALDNVMITDEEEIKATNPVATERFGTVAVNFQSSSTDPATGDVHVMGALPGMVWQDRDVYLQGPIWAKIPHTDGHFHPSPLMGGFGLKHPPPQILIKNTPVPANPPAEFSATKFASFITQYSTGQVSVEIEWELQKENSKRWNPEVQYTSNYAKSANVDFTVDNNGLYTEPRPIGTRYLTRPL

SEQ ID NO: 375 - DNA, 2217 bp, Artificial Sequence
  Description of Artificial Sequence: Synthetic polynucleotide
atggctgccgatggttatcttccagattggctcgaggacaacctctctgagggcattcgcgagtggtgggacttgaaacctggagccccgaaacccaaagccaaccagcaaaagcaggacgacggccggggtctggtgcttcctggctacaagtacctcggacccttcaacggactcgacaagggggagcccgtcaacgcggcggatgcaacggccctcgagcacgacaaggcctacgaccagcagctgcaggcgggtgacaatccgtacctgcggtataaccacgccgacgccgagtttcaggagcgtctgcaagaagatacgtcttttgggggcaacctcgggcgagcagtcttccaggccaagaagcgggttctcgaacctctcggtctggttgaggaaggcgctaagacggctcctggaaagaagagaccggtagagccatcaccccagcgttctccagactcctctacgggcatcggcaagaaaggccaacagcccgccagaaaaagactcaattttggtcagactggcgactcagagtcagttccagaccctcaacctctcggagaaccaccagcagcccccacaagtttgggatctaatacaatggcttcaggcggtggcgcaccaatggcagacaataacgagggtgccgatggagtgggtaattcctcaggaaattggcattgcgattcccaatggctgggcgacagagtcatcaccaccagcacccgcacctgggccttgcccacctacaataaccacctctacaagcaaatctccagtgcttcaacgggggccagcaacgacaaccactacttcggctacagcaccccctgggggtattttgactttaaccgcttccactgccacttctcgccaagagactggcaaagactcatcaacaacaattggggattccggcccaagagactcaacttcaaactcttcaacatccaagtcaaggaggtcacgacgaatgatggcgtcacgaccatcgccaataacctcaccagcaccatccaggtgtttacggactcggagtaccagctgccgtacgttctcggctctgcccaccagggctgcctgcctccgttcccggcggacgtgttcatgattccccagtatggatacctcaccctgaacaacggaagtcaagcggtgggacgctcatccttttactgcctggagtacttcccttcgcagatgctaaggactggaaataacttccaattcagctataccttcgaggatgtaccttttcacagcagctacgctcacagccagagtttggatcgcttgatgaatcctcttattgatcagtatctgtactacctgaacagaacgcaaggaacaacctctggaacaaccaaccaatcacggctgctttttagccaggctgggcctcagtctatgtctttgcaggccagaaattggctacctgggccctgctaccggcaacagagactttcaaagactgctaacgacaacaacaacagtaactttccttggacagcagccagcaaatatcatctcaatggccgcgactcgctggtgaatccaggaccagctatggccagtcacaaggacgatgaagaaaaatttttccctatgcacggcaatctaatatttggcaaagaagggacaacggcaagtaacgcagaattagataatgtaatgattacggatgaagaagagattcgtaccaccaatcctgtggcaacagagcagtatggaactgtggcaaataacttgcagagctcaaatacagctcccacgactagaactgtcaatgatcagggggccttacctggcatggtgtggcaagatcgtgacgtgtaccttcaggggcccatctgggcaaagattccacacacggacggacattttcacccctctcccctcatgggtggattcggacttaaacaccctcctccgcagattctcatcaagaacaccccggtacctgcgaatccttcgaccaccttcagtgcggcaaagtttgcttccttcatcacacagtactccacgggacaggtcagcgtggagatcgagtgggagctgcagaaggaaaacagcaagcgctggaacccggagatccagtacacttccaactattacaagtctaataatgttgaatttgctgttaatactgaaggtgtatatagtgaaccccgccccattggcaccagatacctgactcgtaatctgtaa

SEQ ID NO: 376 - protein, 738 aa, Artificial Sequence
  Description of Artificial Sequence: Synthetic polypeptide
MAADGYLPDWLEDNLSEGIREWWDLKPGAPKPKANQQKQDDGRGLVLPGYKYLGPFNGLDKGEPVNAADATALEHDKAYDQQLQAGDNPYLRYNHADAEFQERLQEDTSFGGNLGRAVFQAKKRVLEPLGLVEEGAKTAPGKKRPVEPSPQRSPDSSTGIGKKGQQPARKRLNFGQTGDSESVPDPQPLGEPPAAPTSLGSNTMASGGGAPMADNNEGADGVGNSSGNWHCDSQWLGDRVITTSTRTWALPTYNNHLYKQISSASTGASNDNHYFGYSTPWGYFDFNRFHCHFSPRDWQRLINNNWGFRPKRLNFKLFNIQVKEVTTNDGVTTIANNLTSTIQVFTDSEYQLPYVLGSAHQGCLPPFPADVFMIPQYGYLTLNNGSQAVGRSSFYCLEYFPSQMLRTGNNFQFSYTFEDVPFHSSYAHSQSLDRLMNPLIDQYLYYLNRTQGTTSGTTNQSRLLFSQAGPQSMSLQARNWLPGPCYRQQRLSKTANDNNNSNFPWTAASKYHLNGRDSLVNPGPAMASHKDDEEKFFPMHGNLIFGKEGTTASNAELDNVMITDEEEIRTTNPVATEQYGTVANNLQSSNTAPTTRTVNDQGALPGMVWQDRDVYLQGPIWAKIPHTDGHFHPSPLMGGFGLKHPPPQILIKNTPVPANPSTTFSAAKFASFITQYSTGQVSVEIEWELQKENSKRWNPEIQYTSNYYKSNNVEFAVNTEGVYSEPRPIGTRYLTRNL

SEQ ID NO: 377 - DNA, 2208 bp, Artificial Sequence
  Description of Artificial Sequence: Synthetic polynucleotide
atggctgccgatggttatcttccagattggctcgaggacaaccttagtgaaggaattcgcgagtggtgggacttgaaacctggagccccgaagcccaaagccaaccagcaaaagcaggacgacggccggggtctggtgcttcctggctacaagtacctcggacccttcaacggactcgacaagggggagcccgtcaacgcggcggacgcagcggccctcgagcacgacaaggcctacgaccagcagctcaaagcgggtgacaatccgtacctgcggtataaccacgccgacgccgagtttcaggagcgtctgcaagaagatacgtcttttgggggcaacctcgggcgagcagtcttccaggccaagaagcgggttctcgaacctctcggtctggttgaggaaggtgctaagacggctcctggaaagaaacgtccggtagagcagtcgccacaagagccagactcctcctcgggcattggcaagacaggccagcagcccgctaaaaagagactcaattttggtcagactggcgactcagagtcagtccccgacccacaacctctcggagaacctccagcaacccccgctgctgtgggacctactacaatggcttcaggcggtggcgcaccaatggcagacaataacgaaggcgccgacggagtgggtaatgcctcaggaaattggcattgcgattccacatggctgggcgacagagtcatcaccaccagcacccgaacctgggccctgcccacctacaacaaccacctctacaaacaaatttccagccaatcaggagcctcgaacgacaatcactactttggctacagcaccccttgggggtattttgatttcaacagattccactgccacttttcaccacgtgactggcagcgactcatcaacaacaattggggattccggcccaagagactcagcttcaagctcttcaacatccaggtcaaggaggtcacgcagaatgaaggcaccaagaccatcgccaataaccttaccagcacggttcaagtgtttacggactcggagtatcagctcccgtacgtgctcggctcggcgcatcaaggatgcctcccgccgttcccagcagacgtcttcatggtgccacagtatggatacctcaccctgaacaacgggagtcaggcagtaggacgctcttcattttactgcctggagtactttccttctcagatgctgcgtaccggaaacaactttaccttcagctacacttttgaggacgttcctttccacagcagctacgctcacagccagagtctggaccgtctcatgaatcctctgattgaccagtacctgtattacttgagcagaacaaacactccaagtggaaccaccacgcagtcaaggcttcagttttctcaggccggagcgagtgacattcgggaccagtctaggaactggcttcctggaccctgttaccgccagcagcgagtatcaaagacatctgcggataacaacaacagtgaatactcgtggactggagctaccaagtaccacctcaatggcagagactctctggtgaatccgggcccggccatggcaagccacaaggactatgaagaaaagttttttcctcagagcggggttctcatctttgggaagcaaggctcagagaaaacaaatgtggacattgaaaaggtcatgattacagacgaagaggaaatcaggacaaccaatcccgtggctacggagcagtatggttctgtatctaccaacctccagagaggcaacagacaagcagctaccgcagatgtcaacacacaaggcgttcttccaggcatggtctggcaggacagagatgtgtaccttcaggggcccatctgggcaaagattccacacacggacggacattttcacccgtctccgctgatgggcggctttggcctgaaacatcctccgcctcagatcctgatcaagaacacgcctgtacctgcggatcctccgaccaccttcaaccagtcaaagctgaactctttcatcactcagtattctactggccaagtcagcgtggagatcgagtgggagctgcagaaggaaaacagcaagcgctggaaccccgagatccagtacacctccaactactacaaatctacaagtgtggactttgctgttaatacagaaggcgtgtactctgaaccccgccccattggcacccgttacctcacccgtaatctgtaa

SEQ ID NO: 378 - protein, 735 aa, Artificial Sequence
  Description of Artificial Sequence: Synthetic polypeptide
MAADGYLPDWLEDNLSEGIREWWDLKPGAPKPKANQQKQDDGRGLVLPGYKYLGPFNGLDKGEPVNAADAAALEHDKAYDQQLKAGDNPYLRYNHADAEFQERLQEDTSFGGNLGRAVFQAKKRVLEPLGLVEEGAKTAPGKKRPVEQSPQEPDSSSGIGKTGQQPAKKRLNFGQTGDSESVPDPQPLGEPPATPAAVGPTTMASGGGAPMADNNEGADGVGNASGNWHCDSTWLGDRVITTSTRTWALPTYNNHLYKQISSQSGASNDNHYFGYSTPWGYFDFNRFHCHFSPRDWQRLINNNWGFRPKRLSFKLFNIQVKEVTQNEGTKTIANNLTSTVQVFTDSEYQLPYVLGSAHQGCLPPFPADVFMVPQYGYLTLNNGSQAVGRSSFYCLEYFPSQMLRTGNNFTFSYTFEDVPFHSSYAHSQSLDRLMNPLIDQYLYYLSRTNTPSGTTTQSRLQFSQAGASDIRDQSRNWLPGPCYRQQRVSKTSADNNNSEYSWTGATKYHLNGRDSLVNPGPAMASHKDYEEKFFPQSGVLIFGKQGSEKTNVDIEKVMITDEEEIRTTNPVATEQYGSVSTNLQRGNRQAATADVNTQGVLPGMVWQDRDVYLQGPIWAKIPHTDGHFHPSPLMGGFGLKHPPPQILIKNTPVPADPPTTFNQSKLNSFITQYSTGQVSVEIEWELQKENSKRWNPEIQYTSNYYKSTSVDFAVNTEGVYSEPRPIGTRYLTRNL

SEQ ID NO: 379 - DNA, 2214 bp, Artificial Sequence
  Description of Artificial Sequence: Synthetic polynucleotide
atggctgccgatggttatcttccagattggctcgaggacaacctctctgagggcattcgcgagtggtgggacttgaaacctggagccccgaaacccaaagccaaccagcaaaagcaggacgacggccggggtctggtgcttcctggctacaagtacctcggacccttcaacggactcgacaagggggagcccgtcaacgcggcggatgcagcggccctcgagcacgacaaggcctacgaccagcagctcaaagcgggtgacaatccgtacctgcggtataaccacgccgacgccgagtttcaggagcgtctgcaagaagatacgtcttttgggggcaacctcgggcgagcagtcttccaggccaagaagagggttctcgaaccttttggtctggttgaggaaggtgctaagacggctcctggaaagaaacgtccggtagagcagtcgccacaagagccagactcctcctcgggcattggcaagacaggccagcagcctgcaagaaaaagattgaattttggtcagactggagacgcagactcagtacctgacccccagcctctcggacagccaccagcagccccctctggtctgggaactaatacgatggctacaggcagtggcgcaccaatggcagacaataacgagggcgccgacggagtgggtaattcctcgggaaattggcattgcgattcccaatggctgggggacagagtcatcaccaccagcacccgaacctgggccctgcccacctacaacaatcacctctacaagcaaatctccaacagcacatctggaggatcttcaaatgacaacgcctacttcggctacagcaccccctgggggtattttgatttcaacagattccactgccatttctcaccacgtgactggcagcgactcatcaacaacaattggggattccggcccaagagactcaacttcaagctcttcaacatccaggtcaaggaggtcacgcagaatgaaggcaccaagaccatcgccaataacctcaccagcaccatccaggtgtttacggactcggagtaccagctgccgtacgttctcggctctgcccaccagggctgcctgcctccgttcccggcggacgtgttcatgattccccagtacggctacctaacactcaacaacggtagtcaggccgtgggacgctcctccttctactgcctggaatactttccttcgcagatgctgagaaccggcaacaacttccagtttacttacaccttcgaggacgtgcctttccacagcagctacgcccacagccagagcttggaccggctgatgaatcctctgattgaccagtacctgtactacttgtctcggactcaaacaacaggaggcacgacaaatacgcagactctgggcttcagccaaggtgggcctaatacaatggccaatcaggcaaagaactggctgccaggaccctgttaccgccagcagcgagtatcaaagacatttgcggataacaacaacagtgaatactcgtggactggagctaccaagtaccacctcaatggcagagactctctggtgaatccgggcccggccatggcaagccacaaggacgatgaagaaaagttttttcctcagagcggggttctcatctttgggaagcaaggctcagagaaaacaaatgtggacattgaaaaggtcatgattacagacgaagaggaaatcaggacaaccaatcccgtggctacggagcagtatggttctgtatctaccaacctccagagaggcaacagacaagcagctaccgcagatgtcaacacacaaggcgttcttccaggcatggtctggcaggacagagatgtgtaccttcaggggcccatctgggcaaagattccacacacggacggacattttcacccctctcccctcatgggtggattcggacttaaacaccctccgcctcagatcctgatcaagaacacgcctgtacccgcggatcctccgaccaccttcaaccagtcaaagctgaactctttcatcacccagtattctactggccaagtcagcgtggagatcgagtgggagctgcagaaggaaaacagcaagcgctggaaccccgagatccagtacacctccaactactacaaatctacaagtgtggactttgctgttaatacagaaggcgtgtactctgaaccccgccccattggcacccgttacctcacccgtaatctgtaa

SEQ ID NO: 380 - protein, 737 aa, Artificial Sequence
  Description of Artificial Sequence: Synthetic polypeptide
MAADGYLPDWLEDNLSEGIREWWDLKPGAPKPKANQQKQDDGRGLVLPGYKYLGPFNGLDKGEPVNAADAAALEHDKAYDQQLKAGDNPYLRYNHADAEFQERLQEDTSFGGNLGRAVFQAKKRVLEPFGLVEEGAKTAPGKKRPVEQSPQEPDSSSGIGKTGQQPARKRLNFGQTGDADSVPDPQPLGQPPAAPSGLGTNTMATGSGAPMADNNEGADGVGNSSGNWHCDSQWLGDRVITTSTRTWALPTYNNHLYKQISNSTSGGSSNDNAYFGYSTPWGYFDFNRFHCHFSPRDWQRLINNNWGFRPKRLNFKLFNIQVKEVTQNEGTKTIANNLTSTIQVFTDSEYQLPYVLGSAHQGCLPPFPADVFMIPQYGYLTLNNGSQAVGRSSFYCLEYFPSQMLRTGNNFQFTYTFEDVPFHSSYAHSQSLDRLMNPLIDQYLYYLSRTQTTGGTTNTQTLGFSQGGPNTMANQAKNWLPGPCYRQQRVSKTFADNNNSEYSWTGATKYHLNGRDSLVNPGPAMASHKDDEEKFFPQSGVLIFGKQGSEKTNVDIEKVMITDEEEIRTTNPVATEQYGSVSTNLQRGNRQAATADVNTQGVLPGMVWQDRDVYLQGPIWAKIPHTDGHFHPSPLMGGFGLKHPPPQILIKNTPVPADPPTTFNQSKLNSFITQYSTGQVSVEIEWELQKENSKRWNPEIQYTSNYYKSTSVDFAVNTEGVYSEPRPIGTRYLTRNL

SEQ ID NO: 381 - DNA, 2217 bp, Artificial Sequence
  Description of Artificial Sequence: Synthetic polynucleotide
atggctgccgatggttatcttccagattggctcgaggacactctctctgaaggaataagacagtggtgggcgctgaaacctggagccccgaagcccaaagccaaccagcaaaagcaggacgacggccggggtctggtgcttcctggctacaagtacctcggacccttcaacggactcgacaagggggagcccgtcaacgcggcggatgcagcggccctcgagcacgacaaggcctacgaccagcagctcaaagcgggtgacaatccgtacctgcggtataaccacgccgacgccgagtttcaggagcgtctgcaagaagatacgtcttttgggggcaacctcgggcgagcagtcttccaggccaagaagcgggttctcgaacctctcggtctggttgaggaaggcgctaagacggctcctggaaagaagagaccggtagagccatcaccccagcgttctccagactcctctacgggcatcggcaagaaaggccaacagcccgccagaaaaagactcaattttggtcagactggcgactcagagtcagttccagaccctcaacctctcggagaaccaccagcagcccccacaagtttgggatctaatacaatggcttcaggcggtggcgcaccaatggcagacaataacgagggtgccgatggagtgggtaattcctcaggaaattggcattgcgattcccaatggctgggcgacagagtcatcaccaccagcacccgcacctgggccttgcccacctacaataaccacctctacaagcaaatctccagtgcttcaacgggggccagcaacgacaaccactacttcggctacagcaccccctgggggtattttgactttaaccgcttccactgccacttctcgccaagagactggcaaagactcatcaacaacaattggggattccggcccaagagactcaacttcaaactcttcaacatccaagtcaaggaggtcacgacgaatgatggcgtcacgaccatcgccaataacctcaccagcaccatccaggtgtttacggactcggagtaccagctgccgtacgttctcggctctgcccaccagggctgcctgcctccgttcccggcggacgtgttcatgattccccagtatggatacctcaccctgaacaacggaagtcaagcggtgggacgctcatccttttactgcctggagtacttcccttcgcagatgctaaggactggaaataacttccaattcagctataccttcgaggatgtaccttttcacagcagctacgctcacagccagagtttggatcgcttgatgaatcctcttattgatcagtatctgtactacctgaacagaacgcaaggaacaacctctggaacaaccaaccaatcacggctgctttttagccaggctgggcctcagtctatgtctttgcaggccagaaattggctacctgggccctgctaccggcaacagagactttcaaagactgctaacgacaacaacaacagtaactttccttggacagcagccagcaaatatcatctcaatggccgcgactcgctggtgaatccaggaccagctatggccagtcacaaggacgatgaagaaaaatttttccctatgcacggcaatctaatatttggcaaagaagggacaacggcaagtaacgcagaattagataatgtaatgattacggatgaagaagagattcgtaccaccaatcctgtggcaacagagcagtatggaactgtggcaaataacttgcagagctcaaatacagctcccacgactagaactgtcaatgatcagggggccttacctggcatggtgtggcaagatcgtgacgtgtaccttcaggggcccatctgggcaaagattccacacacggacggacattttcacccctctcccctcatgggtggattcggacttaaacaccctcctccgcagattctcatcaagaacaccccggtacctgcgaatccttcgaccaccttcagtgcggcaaagtttgcttccttcatcacacagtactccacgggacaggtcagcgtggagatcgagtgggagctgcagaaggaaaacagcaagcgctggaacccggagatccagtacacttccaactattacaagtctaataatgttgaatttgctgttaatactgaaggtgtatatagtgaaccccgccccattggcaccagatacctgactcgtaatctgtaa

SEQ ID NO: 382 - protein, 738 aa, Artificial Sequence
  Description of Artificial Sequence: Synthetic polypeptide
MAADGYLPDWLEDTLSEGIRQWWALKPGAPKPKANQQKQDDGRGLVLPGYKYLGPFNGLDKGEPVNAADAAALEHDKAYDQQLKAGDNPYLRYNHADAEFQERLQEDTSFGGNLGRAVFQAKKRVLEPLGLVEEGAKTAPGKKRPVEPSPQRSPDSSTGIGKKGQQPARKRLNFGQTGDSESVPDPQPLGEPPAAPTSLGSNTMASGGGAPMADNNEGADGVGNSSGNWHCDSQWLGDRVITTSTRTWALPTYNNHLYKQISSASTGASNDNHYFGYSTPWGYFDFNRFHCHFSPRDWQRLINNNWGFRPKRLNFKLFNIQVKEVTTNDGVTTIANNLTSTIQVFTDSEYQLPYVLGSAHQGCLPPFPADVFMIPQYGYLTLNNGSQAVGRSSFYCLEYFPSQMLRTGNNFQFSYTFEDVPFHSSYAHSQSLDRLMNPLIDQYLYYLNRTQGTTSGTTNQSRLLFSQAGPQSMSLQARNWLPGPCYRQQRLSKTANDNNNSNFPWTAASKYHLNGRDSLVNPGPAMASHKDDEEKFFPMHGNLIFGKEGTTASNAELDNVMITDEEEIRTTNPVATEQYGTVANNLQSSNTAPTTRTVNDQGALPGMVWQDRDVYLQGPIWAKIPHTDGHFHPSPLMGGFGLKHPPPQILIKNTPVPANPSTTFSAAKFASFITQYSTGQVSVEIEWELQKENSKRWNPEIQYTSNYYKSNNVEFAVNTEGVYSEPRPIGTRYLTRNL

SEQ ID NO: 383 - DNA, 2208 bp, Artificial Sequence; identical to SEQ ID NO: 19
  Description of Artificial Sequence: Synthetic polynucleotide

SEQ ID NO: 384 - protein, 735 aa, Artificial Sequence [sequence omitted]

SEQ ID NO: 385 - DNA, 2208 bp, Artificial Sequence
  Description of Artificial Sequence: Synthetic polynucleotide
atggctgccgatggttatcttccagattggctcgaggacaacctctctgagggcattcgcgagtggtgggcgctgaaacctggagccccgaagcccaaagccaaccagcaaaagcaggacgacggccggggtctggtgcttcctggctacaagtacctcggacccttcaacggactcgacaagggggagcccgtcaacgcggcggacgccgcggccctcgagcacgacaaggcctacgaccagcagctgcaggcgggtgacaatccgtacctgcggtataaccacgccgacgccgagtttcaggagcgtctgcaagaagatacgtcttttgggggcaacctcgggcgagcagtcttccaggccaaaaagaggcttcttgaacctcttggtctggttgaggaagcagctaaaacggctcctggaaagaagaggcctgtagagcagtctcctcaggaaccggactcctccgcgggtattggcaaatcgggtgcacagcccgccaaaaagagactcaatttcggtcagactggcgactcagagtcagtcccagaccctcaacctctcggagaaccaccagcagcccccacaagtttgggatctaatacaatggcttcaggcggtggcgcaccaatggcagacaataacgaaggcgccgacggagtgggtaatgcctcaggaaattggcattgcgattccacatggctgggcgacagagtcatcaccaccagcacccgcacctgggccttgcccacctacagcaaccatctctacaagcaaatctccagccaatcaggagcttcaaacgacaacgactactttggctacagcaccccttgggggtattttgatttcaacagattccactgccacttttcaccacgtgactggcaaagactcatcaacaacaactggggattccgacccaagagactcaacttcaagctctttaacattcaagtcaaagaggtcacgcagaatgacggtacgacgacgattgccaataaccttaccagcacggttcaggtgtttactgactcggagtaccagctcccgtacgtcctcggctcggcgcatcaaggatgcctcccgccgttcccagcagacgtcttcatggtgccacagtatggatacctcaccctgaacaacgggagtcaggcagtaggacgctcttcattttactgcctggagtactttccttctcagatgctgcgtaccggaaacaactttaccttcagctacacttttgaggacgttcctttccacagcagctacgctcacagccagagtctggaccgtctcatgaatcctctcatcgaccagtacctgtattacttgagcagaacaaacactccaagtggaaccaccacgcagtcaaggcttcagttttctcaggccggagcgagtgacattcgggaccagtctaggaactggcttcctggaccctgttaccgccagcagcgagtatcaaagacatctgaggataacaacaacagtgaatactcgtggactggagctaccaagtaccacctcaatggcagagactctctggtgaatccgggcccggccatggcaagccacaaggacgatgaagaaaagttttttcctcagagcggggttctcatctttgggaagcaaggctcagagaaaacaaatgtggacattgaaaaggtcatgattacagacgaagaggaaatcaggacaaccaatcccgtggctacggagcagtatggttctgtatctaccaacctccagagaggcaacagacaagcagctaccgcagatgtcaacacacaaggcgttcttccaggcatggtctggcaggacagagatgtgtaccttcaggggcccatctgggcaaagattccacacacggacggacattttcacccctctcccctcatgggtggattcggacttaaacaccctcctccacagattctcatcaagaacaccccggtacctgcgaatccttcgaccaccttcagtgcggcaaagtttgcttccttcatcacacagtactccacgggacaggtcagcgtggagatcgagtgggagctgcagaaggaaaacagcaaacgctggaatcccgaaattcagtacacttccaactacaacaagtctgttaatgtggactttactgtggacactaatggcgtgtattcagagcctcgccccattggcaccagatacctgactcgtaatctgtaa

SEQ ID NO: 386 - protein, 735 aa, Artificial Sequence
  Description of Artificial Sequence: Synthetic polypeptide
MAADGYLPDWLEDNLSEGIREWWALKPGAPKPKANQQKQDDGRGLVLPGYKYLGPFNGLDKGEPVNAADAAALEHDKAYDQQLQAGDNPYLRYNHADAEFQERLQEDTSFGGNLGRAVFQAKKRLLEPLGLVEEAAKTAPGKKRPVEQSPQEPDSSAGIGKSGAQPAKKRLNFGQTGDSESVPDPQPLGEPPAAPTSLGSNTMASGGGAPMADNNEGADGVGNASGNWHCDSTWLGDRVITTSTRTWALPTYSNHLYKQISSQSGASNDNDYFGYSTPWGYFDFNRFHCHFSPRDWQRLINNNWGFRPKRLNFKLFNIQVKEVTQNDGTTTIANNLTSTVQVFTDSEYQLPYVLGSAHQGCLPPFPADVFMVPQYGYLTLNNGSQAVGRSSFYCLEYFPSQMLRTGNNFTFSYTFEDVPFHSSYAHSQSLDRLMNPLIDQYLYYLSRTNTPSGTTTQSRLQFSQAGASDIRDQSRNWLPGPCYRQQRVSKTSEDNNNSEYSWTGATKYHLNGRDSLVNPGPAMASHKDDEEKFFPQSGVLIFGKQGSEKTNVDIEKVMITDEEEIRTTNPVATEQYGSVSTNLQRGNRQAATADVNTQGVLPGMVWQDRDVYLQGPIWAKIPHTDGHFHPSPLMGGFGLKHPPPQILIKNTPVPANPSTTFSAAKFASFITQYSTGQVSVEIEWELQKENSKRWNPEIQYTSNYNKSVNVDFTVDTNGVYSEPRPIGTRYLTRNL

SEQ ID NO: 387 - DNA, 2208 bp, Artificial Sequence
  Description of Artificial Sequence: Synthetic polynucleotide
atggctgccgatggttatcttccagattggctcgaggacaacctctctgagggcattcgcgagtggtgggcgctgaaacctggagccccgaagcccaaagccaaccagcaaaagcaggacgacggccggggtctggtgcttcctggctacaagtacctcggacccttcaacggactcgacaagggggagcccgtcaacgcggcggacgcagcggccctcgagcacgacaaggcctacgaccagcagctgcaggcgggtgacaatccgtacctgcggtataaccacgccgacgccgagttccaggagcgtctgcaagaagatacgtcttttgggggcaacctcgggcgagcagtcttccaggccaagaagagggttctcgaaccttttggtctggttgaggaaggtgctaagacggctcctggaaagaaacgtccggtagagcagtcgccacaagagccagactcctcctcgggcattggcaagacaggccagcagcccgctaaaaagagactcaattttggtcagactggcgactcagagtcagtcccagaccctcaacctctcggagaaccaccagcagcccccacaagtttgggatctaatacaatggcttcaggcggtggcgcaccaatggcagacaataacgagggcgccgacggagtgggtaattcctcgggaaattggcattgcgattccacatggatgggcgacagagtcatcaccaccagcacccgaacctgggccctgcccacctacaacaaccacctctacaaacaaatttccagccaatcaggagcttcaaacgacaaccactactttggctacagcaccccttgggggtattttgactttaacagattccactgccacttttcaccacgtgactggcagcgactcattaacaacaactggggattccggcccaagaaactcaacttcaagctctttaacatccaggtcaaggaggtcacgcagaatgaaggcaccaagaccatcgccaataacctcaccagcaccatccaggtgtttacggactcggagtaccagctgccgtacgttctcggctctgcccaccagggctgcctgcctccgttcccggcggacgtgttcatgattccccagtacggctacctaacactcaacaacggtagtcaggccgtgggacgctcctccttctactgcctggaatactttccttcgcagatgctgagaaccggcaacaacttccagtttacttacaccttcgaggacgtgcctttccacagcagctacgcccacagccagagcttggaccggctgatgaatcctctgattgaccagtacctgtattacttgtctcggactcaaacaacaggaggcacgacaaatacgcagactctgggcttcagccaaggtgggcctaatacaatggccaatcaggcaaagaactggctgcctggaccctgttaccgccagcagcgagtatcaaagacatctgcggataacaacaacagtgaatactcgtggactggagctaccaagtaccacctcaatggcagagactctctggtgaatccgggcccggccatggcaagccacaaggacgatgaagaaaagttttttcctcagagcggggttctcatctttgggaagcaaggctcagagaaaacaaatgtggacattgaaaaggttatgattacagacgaagaggaaatcaggacaaccaatcccgtggctacggagcagtatggttctgtatctaccaacctccagagaggcaacagacaagcagctaccgcagatgtcaacacacagggcgttcttccaggcatggtctggcaggacagagatgtgtaccttcagggtcccatttgggccaaaattcctcacacagatggacactttcacccgtcccctcttatgggcggctttggactcaagaacccgcctcctcagatcctcatcaaaaacacgcctgttcctgcgaatcctccggcagagttttcagctacaaagtttgcttcattcatcacccaatactccacaggacaagtgagtgtggaaattgaatgggagctgcagaaagaaaacagcaagcgctggaatcccgaagtgcagtacacatccaattatgcaaaatctgccaacgttgattttactgtggacactaatggcgtgtattcagagcctcgccccattggcaccagatacctcacccgtaatctgtaa

SEQ ID NO: 388 - protein, 735 aa, Artificial Sequence
  Description of Artificial Sequence: Synthetic polypeptide
MAADGYLPDWLEDNLSEGIREWWALKPGAPKPKANQQKQDDGRGLVLPGYKYLGPFNGLDKGEPVNAADAAALEHDKAYDQQLQAGDNPYLRYNHADAEFQERLQEDTSFGGNLGRAVFQAKKRVLEPFGLVEEGAKTAPGKKRPVEQSPQEPDSSSGIGKTGQQPAKKRLNFGQTGDSESVPDPQPLGEPPAAPTSLGSNTMASGGGAPMADNNEGADGVGNSSGNWHCDSTWMGDRVITTSTRTWALPTYNNHLYKQISSQSGASNDNHYFGYSTPWGYFDFNRFHCHFSPRDWQRLINNNWGFRPKKLNFKLFNIQVKEVTQNEGTKTIANNLTSTIQVFTDSEYQLPYVLGSAHQGCLPPFPADVFMIPQYGYLTLNNGSQAVGRSSFYCLEYFPSQMLRTGNNFQFTYTFEDVPFHSSYAHSQSLDRLMNPLIDQYLYYLSRTQTTGGTTNTQTLGFSQGGPNTMANQAKNWLPGPCYRQQRVSKTSADNNNSEYSWTGATKYHLNGRDSLVNPGPAMASHKDDEEKFFPQSGVLIFGKQGSEKTNVDIEKVMITDEEEIRTTNPVATEQYGSVSTNLQRGNRQAATADVNTQGVLPGMVWQDRDVYLQGPIWAKIPHTDGHFHPSPLMGGFGLKNPPPQILIKNTPVPANPPAEFSATKFASFITQYSTGQVSVEIEWELQKENSKRWNPEVQYTSNYAKSANVDFTVDTNGVYSEPRPIGTRYLTRNL

SEQ ID NO: 389 - DNA, 2214 bp, Artificial Sequence; identical to SEQ ID NO: 379
  Description of Artificial Sequence: Synthetic polynucleotide

SEQ ID NO: 390 - protein, 737 aa, Artificial Sequence; identical to SEQ ID NO: 380
  Description of Artificial Sequence: Synthetic polypeptide

SEQ ID NO: 391 - DNA, 2196 bp, Artificial Sequence
  Description of Artificial Sequence: Synthetic polynucleotide
atggctgctgacggttatcttccagattggctcgaggacaacctctctgagggcattcgcgagtggtgggcgctgaaacctggagccccgcaacccaaagccaaccagcaaaagcaggacgacggccggggtctggtgcttcctggctacaagtacctcggacccttcaacggactcgacaagggggagcccgtcaacgaggcggacgccgcggccctcgagcacgacaaggcctacgaccagcagctcaaagcgggtgacaatccgtacctgcggtataatcacgccgacgccgagtttcaagagcgtctgcaagaagatacgtcctttgggggcaacctcgggcgagcagtcttccaggccaaaaagagggtactcgagcctctgggtctggttgaggaaggcgctaagacggctcctggaaagaagcggccagtagaaccggactccagctcgggcatcggcaagtcaggccagcagcccgcgaaaaagagactgaattttgggcagactggcgactcagagtcagtgcctgacccccaacctctctcagaaccacccgcaggtccctctggtctgggatctggtacaatggctgctggcggtggcgctccaatggcagacaataacgaaggcgccgacggagtgggtaatgtctcaggaaattggcattgcgattccacatggctgggcgaccgagtcatcaccaccagcactcggacctgggccctccccacctacaacaaccacctctacaagcaaatctccaacgggacctcgggaggcagcagcaacgacaacacctactttggctacagcaccccctgggggtattttgactttaacagattccactgccacttttcaccacgtgactggcagcgactcatcaacaacaactgggggttccggcccaagaagctcaacttcaagctcttcaacatccaggtcaaggaggtcacccagaatgaaggcaccaagaccatcgccaataacctcaccagcacggtgcaggtctttacggactcggagtaccagctcccgtacgtgctcggctctgcccaccagggctgcctgcctccgttcccggcggacgtgttcatgattccgcagtacgggtacctgacgctgaacaacgggagccaggccgtggggcgatcctccttctactgcctggagtactttccctcgcagatgctgagaacgggcaacaactttaccttcagctacaccttcgaggacgtgcccttccacagcagctacgcgcacagccagagcctggaccggctgatgaacccgctgattgaccagtacctgtactacctgtctcggactcagaccaacgggaccaatgccacgcagactctgttgtttgctcaggccgggcctcagaacatgtcggctcaggccaagaactggctgcctggtccttgctatcggcagcagcgcgtctctacgacagtgtcgcaaaacaacaacagcaactttacctggaccggggcgaccaagtaccacctgaacggccgagactccctggtgagccccggtgtcgccatggcaacgcacaaggacgacgaggagcgcttcttcccgagcagcggggtcctgatgtttggcaagcagggcgctggaaaggacaatgtcgagtacaccaacgtgatgctcaccagcgaggaggagatcaagaccaccaaccctgtggccacggagcagtacggcgtggtggctgacaatctgcagcagaccaactcagctcccattgtgggggcagtcaacagccagggggccttacccggtatggtctggcagaaccgggacgtgtacctgcagggtcccatctgggccaagatcccgcatacggacggcaactttcacccgtctcctctcatgggcggctttggactgaaacacccgcctccccagatcctgatcaaaaacacgccggtacctgcggatcccccggtgaactttacggacgctaagctggcgagtttcatcacgcagtacagcaccgggcaggtcagcgtggagattgagtgggagctgcagaaggagaacagcaagcgctggaatcccgagattcagtacacttccaattattataaatcagctaatgtggactttgccgtcaatgcagatggtgtatatagtgaaccccgccccattggcactcgttacctcacccgtaatctgtaa

SEQ ID NO: 392 - protein, 731 aa, Artificial Sequence
  Description of Artificial Sequence: Synthetic polypeptide
MAADGYLPDWLEDNLSEGIREWWALKPGAPQPKANQQKQDDGRGLVLPGYKYLGPFNGLDKGEPVNEADAAALEHDKAYDQQLKAGDNPYLRYNHADAEFQERLQEDTSFGGNLGRAVFQAKKRVLEPLGLVEEGAKTAPGKKRPVEPDSSSGIGKSGQQPAKKRLNFGQTGDSESVPDPQPLSEPPAGPSGLGSGTMAAGGGAPMADNNEGADGVGNVSGNWHCDSTWLGDRVITTSTRTWALPTYNNHLYKQISNGTSGGSSNDNTYFGYSTPWGYFDFNRFHCHFSPRDWQRLINNNWGFRPKKLNFKLFNIQVKEVTQNEGTKTIANNLTSTVQVFTDSEYQLPYVLGSAHQGCLPPFPADVFMIPQYGYLTLNNGSQAVGRSSFYCLEYFPSQMLRTGNNFTFSYTFEDVPFHSSYAHSQSLDRLMNPLIDQYLYYLSRTQTNGTNATQTLLFAQAGPQNMSAQAKNWLPGPCYRQQRVSTTVSQNNNSNFTWTGATKYHLNGRDSLVSPGVAMATHKDDEERFFPSSGVLMFGKQGAGKDNVEYTNVMLTSEEEIKTTNPVATEQYGVVADNLQQTNSAPIVGAVNSQGALPGMVWQNRDVYLQGPIWAKIPHTDGNFHPSPLMGGFGLKHPPPQILIKNTPVPADPPVNFTDAKLASFITQYSTGQVSVEIEWELQKENSKRWNPEIQYTSNYYKSANVDFAVNADGVYSEPRPIGTRYLTRNL

SEQ ID NO: 393 - DNA, 2196 bp, Artificial Sequence
  Description of Artificial Sequence: Synthetic polynucleotide
atggctgctgacggttatcttccagattggctcgaggacaacctctctgagggcattcgcgagtggtgggcgctgaaacctggagccccgcaacccaaagccaaccagcaaaagcaggacgacggccggggtctggtgcttcctggctacaagtacctcggacccttcaacggactcgacaagggggagcccgtcaacgaggcggacgccgcggccctcgagcacgacaaggcctacgaccagcagctcaaagcgggtgacaatccgtacctgcggtataatcacgccgacgccgagtttcaagagcgtctgcaagaagatacgtcctttgggggcaacctcgggcgagcagtcttccaggccaaaaagagggtactcgagcctctgggtctggttgaggaaggcgctaagacggctcctggaaagaagcggccagtagaaccggactccagctcgggcatcggcaagtcaggccggcagcccgcgaaaaagagactgaattttgggcagactggcgactcagagtcagtgcctgacccccaacctctctcagaaccacccgcaggtccctctggtctgggatctggtacaatggctgcaggcggtggcgctccaatggcagacaataacgaaggcgccgacggagtgggtaatgcctcaggaaattggcattgcgattccacatggctgggcgaccgagtcatcaccaccagcactcggacctgggccctccccacctacaacaaccacctctacaagcaaatctccaacgggacctcgggaggcagcagcaacgacaacacctactttggctacagcaccccctgggggtattttgactttaacagattccactgccacttttcaccacgtgactggcagcgactcatcaacaacaactggggattccggcccaagaggctcaacttcaagctcttcaacatccaggtcaaggaggtcacccagaatgaaggcaccaagaccatcgccaataacctcaccagcacggtgcaggtctttacggactcgaagtaccagctcccgtacgtgctcggctctgcccaccagggctgcctgcctccgttcccggcggacgtgttcatgattccgcagtacgggtacctgacgctgaacaacgggagccaggccgtggggcgatcctccttctactgcctggagtactttccctcgcagatgctgagaacgggcaacaactttaccttcagctacaccttcgaggacgtgcccttccacagcagctacgcgcacagccagagcctggaccggctgatgaacccgctgattgaccagtacctgtactacctgtctcggactcagaccaacgggaccaatgccacgcagactctgttgtttgctcaggccgggcctcagaacatgtcggctcaggccaagaactggctgcctggtccttgctatcggcagcagcgcgtctctacgacagtgtcgcaaaacaacaacagcaactttacctggaccggggcgaccaagtaccacctgaacggccgagactccctggtgaaccccggtgtcgccatggcaacgcacaaggacgacgaggagcgcttcttcccgagcagcggggtcctgatgtttggcaagcagggcgctggaaaggacaatgtcgagtacaccaacgtgatgctcaccagcgaggaggagatcaagaccaccaaccctgtggccacggagcagtacggtgtggtggctgacaatctgcagcagaccaactcggctcccattgtgggggcagtcaacagccagggggccttacccggtatggtctggcagaaccgggacgtgtacctgcagggtcccatctgggccaagatcccgcatacggacggcaactttcacccgtctcctctcatgggcggctttggactgaaacacccgcctccccagatcctgatcaaaaacacgccggtacctgcggatcccccggtgaactttacggacgctaagctggcgagtttcatcacgcagtacagcaccgggcaggtcagcgtggagattgagtgggagctgcagaaggagaacagcaagcgctggaatcccgagattcagtacacttccaattattataaatcagctaatgtggactttgccgtcaatgcagatggtgtatatagtgaaccccgccccattggcactcgttacctcacccgtaatctgtaa

SEQ ID NO: 394 - protein, 731 aa, Artificial Sequence
  Description of Artificial Sequence: Synthetic polypeptide
MAADGYLPDWLEDNLSEGIREWWALKPGAPQPKANQQKQDDGRGLVLPGYKYLGPFNGLDKGEPVNEADAAALEHDKAYDQQLKAGDNPYLRYNHADAEFQERLQEDTSFGGNLGRAVFQAKKRVLEPLGLVEEGAKTAPGKKRPVEPDSSSGIGKSGRQPAKKRLNFGQTGDSESVPDPQPLSEPPAGPSGLGSGTMAAGGGAPMADNNEGADGVGNASGNWHCDSTWLGDRVITTSTRTWALPTYNNHLYKQISNGTSGGSSNDNTYFGYSTPWGYFDFNRFHCHFSPRDWQRLINNNWGFRPKRLNFKLFNIQVKEVTQNEGTKTIANNLTSTVQVFTDSKYQLPYVLGSAHQGCLPPFPADVFMIPQYGYLTLNNGSQAVGRSSFYCLEYFPSQMLRTGNNFTFSYTFEDVPFHSSYAHSQSLDRLMNPLIDQYLYYLSRTQTNGTNATQTLLFAQAGPQNMSAQAKNWLPGPCYRQQRVSTTVSQNNNSNFTWTGATKYHLNGRDSLVNPGVAMATHKDDEERFFPSSGVLMFGKQGAGKDNVEYTNVMLTSEEEIKTTNPVATEQYGVVADNLQQTNSAPIVGAVNSQGALPGMVWQNRDVYLQGPIWAKIPHTDGNFHPSPLMGGFGLKHPPPQILIKNTPVPADPPVNFTDAKLASFITQYSTGQVSVEIEWELQKENSKRWNPEIQYTSNYYKSANVDFAVNADGVYSEPRPIGTRYLTRNL

SEQ ID NO: 395 - DNA, 2196 bp, Artificial Sequence
  Description of Artificial Sequence: Synthetic polynucleotide
atggctgctgacggttatcttccagattggctcgaggacaacctctctgagggcattcgcgagtggtgggcgctgaaacctggagccccgcaacccaaagccaaccagcaaaagcaggacgacggccggggtctggtgcttcctggctacaagtacctcggacccttcaacggactcgacaagggggagcccgtcaacgaggcggacgccgcggccctcgagcacgacaaggcctacgaccagcagctcaaagcgggtgacaatccgtacctgcggtataatcacgccgacgccgagtttcaagagcgtctgcaagaagatacgtcctttgggggcaacctcgggcgagcagtcttccaggccaaaaagagggtactcgagcctctgggtctggttgaggaaggcgctaagacggctcctggaaagaagcggccagtagaaccggactccagctcgggcatcggcaagtcaggccagcagcccgcgaaaaagagactgaattttgggccgactggcgactcagagtcagtgcctgacccccaacctctctcagaaccacctgcaggtccctctggtctgggatctggtacaatggctgcaggcggtggcgctccaatggcagacaataacgaaggcgccgacggagtgggtaatgtctcaggaaattggcattgcgattccacatggctgggcgaccgagtcatcaccaccagcactcggacctgggccctccccacctacaacaaccacctctacaagcaaatctccaacgggacctcgggaggcagcagcaacgacaacacctactttggctacagcaccccctgggggtattttgactttaacagattccactgccacttttcaccacgcgactggcagcgactcatcaacaacaactggggattccggcccaagaagctcaacttcaagctcttcaacatccaggtcaaggaggtcacccagaatgaaggcaccaagaccaccgccaataacctcaccagcacggtgcaggtctttacggactcggagtaccagctcccgtacgtgctcggctctgcccaccagggctgcctgcctccgttcccggcggacgtgttcatgattccgcagtacgggtacctgacgctgaacaacgggagccaggccgtggggcgatcctccttctactgcctggagtactttccctcgcagatgctgagaacgggcaacaactttaccttcagctacaccttcgaggacgtgcccttccacagcagctacgcgcacagccagagcctggaccggctgatgaacccgctgattgaccagtacctgtactacctgtctcggactcagaccaacgggaccaatgccacgcagactctgttgtttgctcaggccgggcctcagaacatgtcggctcaggccaagaactggctgcctggtccttgctatcggcagcagcgcgtctctacggcagtgtcgcaaaacaacaacagcaactttacctggaccggggcgaccaagtaccacctgaacggccgagactccctggtgaaccccggtgtcgccatggcaacgcacaaggacgacgaggagcgcttcttcccgagcagcggggtcctgatgtttggcaagcagggcgctggaaaggacaatgtcgagtacaccaacgtgatgctcaccagcgaggaggagatcaagaccaccaaccctgtggccacggagcagtacggtgtggtggctgacaatctgcagcagaccaactcggctcccattgtgggggcagtcaacagccagggggccttacccggtatggtctggcagaaccgggacgtgtacctgcagggtcccatctgggccaagatcccgcatacggacggcaactttcacccgtctcctctcatgggcggctttggactgaaacacccgcctccccagatcctgatcaaaaacacgccggtacctgcggatcccccggtgaactttacggacgctaagctggcgagtttcatcacgcagtacagcaccgggcaggtcagcgtggagattgagtgggagctgcagaaggagaacagcaagcgctggaatcccgagattcagtacacttccaattattataaatcagctaatgtggactttgccgtcaatgcagatggtgtatatagcgaaccccgccccattggcactcgttacctcacccgtaatctgtaa

SEQ ID NO: 396 - protein, 731 aa, Artificial Sequence
  Description of Artificial Sequence: Synthetic polypeptide
MAADGYLPDWLEDNLSEGIREWWALKPGAPQPKANQQKQDDGRGLVLPGYKYLGPFNGLDKGEPVNEADAAALEHDKAYDQQLKAGDNPYLRYNHADAEFQERLQEDTSFGGNLGRAVFQAKKRVLEPLGLVEEGAKTAPGKKRPVEPDSSSGIGKSGQQPAKKRLNFGPTGDSESVPDPQPLSEPPAGPSGLGSGTMAAGGGAPMADNNEGADGVGNVSGNWHCDSTWLGDRVITTSTRTWALPTYNNHLYKQISNGTSGGSSNDNTYFGYSTPWGYFDFNRFHCHFSPRDWQRLINNNWGFRPKKLNFKLFNIQVKEVTQNEGTKTTANNLTSTVQVFTDSEYQLPYVLGSAHQGCLPPFPADVFMIPQYGYLTLNNGSQAVGRSSFYCLEYFPSQMLRTGNNFTFSYTFEDVPFHSSYAHSQSLDRLMNPLIDQYLYYLSRTQTNGTNATQTLLFAQAGPQNMSAQAKNWLPGPCYRQQRVSTAVSQNNNSNFTWTGATKYHLNGRDSLVNPGVAMATHKDDEERFFPSSGVLMFGKQGAGKDNVEYTNVMLTSEEEIKTTNPVATEQYGVVADNLQQTNSAPIVGAVNSQGALPGMVWQNRDVYLQGPIWAKIPHTDGNFHPSPLMGGFGLKHPPPQILIKNTPVPADPPVNFTDAKLASFITQYSTGQVSVEIEWELQKENSKRWNPEIQYTSNYYKSANVDFAVNADGVYSEPRPIGTRYLTRNL

SEQ ID NO: 397 - DNA, 4404 bp, Artificial Sequence
  Description of Artificial Sequence: Synthetic polynucleotide
atggctgccgatggttatcttccagattggctcgagggcaacctctctgagggcattcgcgagtggtgggacttgaaacctggagccccgaaacccaaagccaaccagcaaaagcaggacgacggccggggtctggtgcttcctggctacaggtacctcggacccttcaacggactcgacaagggagagccggtcaacgaggcagacgccgcggccctcgagcacgacaaggcctacgacaagcagctcgagcagggggacaacccgtacctcaagtacaaccacgccgacgccgagtttcaggagcgtcttcaagaagatacgtcttttgggggcaacctcgggcgagcagtcttccaggccaagaagcgggttctcgaacctctcggtctggttgaggaaggcgctaagacggctcctggaaagaagagacccatagaatcccccgactcctccacgggcatcggcaagaacggccagccgcccgctaaaaagaagctcaactttgggcagactggcgactcagagtcagtgcccgacccccaacctctcggagaacctcccgccgcgccctcaggtctgggatctggtacaatggctgcaggcggtggcgcaccaatggcagacaataacgaaggcgccgacggagtgggtaatgcctccggaaattggcattgcgattccacatggctgggcgacagagtcatcaccaccagcacccgcacctgggccctgcccacctacaacaaccacctctacaagcagatatcaagtcagagcggggctaccaacgacaaccacttcttcggctacagcaccccctggggctattttgacttcaacagattccactgccacttctcaccacgtgactggcagcgactcatcaacaacaactggggattccggcccagaaagctgcggttcaagttgttcaacatccaggtcaaggaggtcacgacgaacgacggcgttacgaccatcgctaataaccttaccagcacgattcaggtcttctcggactcggagtaccaactgccgtacgtcctcggctctgcgcaccagggctgcctccctccgttccctgcggacgtgttcatgattcctcagtacggatatctgactctaaacaacggcagtcagtctgtgggacgttcctccttctactgcctggagtactttccttctcagatgctgagaacgggcgataactttgaattcagctacacctttgaggaagtgcctttccacagcagctatgcgcacagccagagcctggaccggctgatgaatcccctcatcgaccagtacctgtactacctggcccggacccagagcactacggggtccacaagggagctgcagttccatcaggctgggcccaacaccatggccgagcaatcaaagaactggctgcccggaccctgttatcggcagcagagactgtcaaaaaacatagacagcaacaacaacagtaactttgcctggaccggggccactaaataccatctgaatggtagaaattcattaaccaacccgggcgtagccatggccaccaacaaggacgacgaggaccagttctttcccatcaacggagtgctggtttttggcaaaacgggggctgccaacaagacaacgctggaaaacgtgctaatgaccagcgaggaggagatcaaaaccaccaatcccgtggctacagaagaatacggtgtggtctccagcaacctgcaatcgtctacggccggaccccagacacagactgtcaacagccagggggctctgcccggcatggtctggcagaaccgggacgtgtacctgcagggtcccatctgggccaaaattcctcacacggacggcaactttcacccgtctcccctgatgggcggatttggactcaaacacccgcctcctcaaattctcatcaaaaacaccccggtacctgctaatcctccagaggtgtttactcctgccaagtttgcctcatttatcacgcagtacagcaccggccaggtcagcgtggagatcgagtgggaactgcagaaagaaaacagcaaacgctggaatccagagattcagtacacctcaaattatgccaagtctaataatgtggaatttgctgtcaacaacgaaggggtttatactgagcctcgccccattggcacccgttacctcacccgtaacctgtaaatggctgccgatggttatcttccagattggctcgaggacaacctctctgagggcattcgcgagtggtgggacttgaaacctggagccccgaaacccaaagccaaccagcaaaagcaggacgacggccggggtctggtgcttcctggctacaagtacctcggacccttcaacggactcgacaagggggagcccgtcaacgcggcggacgcagcggccctcgagcacgacaaggcctacgaccagcagctcaaagcgggtgacaatccgtacctgcggtataaccacgccgacgccgagtttcaggagcgtctgcaagaagatacgtcttttgggggcaacctcgggcgagcagtcttccaggccaagaagcgggttctcgaacctctcggtctggttgaggaaggcgctaagacggctcctggaaagaagagaccggtagagccatcaccccagcgttctccagactcctctacgggcatcggcaagaaaggccagcagcccgcgaaaaagagactcaactttgggcagactggcgactcagagtcagtgcccgaccctcaaccaatcggagaaccccccgcaggcccctctggtctgggatctggtacaatggctgcaggcggtggcgctccaatggcagacaataacgaaggcgccgacggagtgggtagttcctcaggaaattggcattgcgattccacatggctgggcgacagagtcatcaccaccagcacccgaacctgggccctccccacctacaacaaccacctctacaagcaaatctccaacgggacttcgggaggaagcaccaacgacaacacctacttcggctacagcaccccctgggggtattttgactttaacagattccactgccacttctcaccacgtgactggcagcgactcatcaacaacaactggggattccggcccaagagactcaacttcaagctcttcaacatccaggtcaaggaggtcacgcagaatgaaggcaccaagaccatcgccaataaccttaccagcacgattcaggtctttacggactcggaataccagctcccgtacgtcctcggctctgcgcaccagggctgcctgcctccgttcccggcggacgtcttcatgattcctcagtacgggtacctgactctgaacaatggcagtcaggccgtgggccgttcctccttctactgcctggagtactttccttctcaaatgctgagaacgggcaacaactttgagttcagctaccagtttgaggacgtgccttttcacagcagctacgcgcacagccaaagcctggaccggctgatgaaccccctcatcgaccagtacctgtactacctgtctcggactcagtccacgggaggtaccgcaggaactcagcagttgctattttctcaggccgggcctaataacatgtcggctcaggccaaaaactggctacccgggccctgctaccggcagcaacgcgtctccacgacactgtcgcaaaataacaacagcaactttgcctggaccggtgccaccaagtatcatctgaatggcagagactctctggtaaatcccggtgtcgctatggcaacccacaaggacgacgaagagcgattttttccgtccagcggagtcttaatgtttgggaaacagggagctggaaaagacaacgtggactatagcagcgttatgctaaccagtgaggaagaaattaaaaccaccaacccagtggccacagaacagtacggcgtggtggccgataacctgcaacagcaaaacgccgctcctattgtaggggccgtcaacagtcaaggagccttacctggcatggtctggcagaaccgggacgtgtacctgcagggtcctatctgggccaagattcctcacacggacggaaactttcatccctcgccgctgatgggaggctttggactgaaacacccgcctcctcagatcctgattaagaatacacctgttcccgcggatcctccaactaccttcagtcaagctaagctggcgtcgttcatcacgcagtacagcaccggacaggtcagcgtggaaattgaatgggagctgcagaaagaaaacagcaaacgctggaacccagagattcaatacacttccaactactacaaatctacaaatgtggactttgctgttaacacagatggcacttattctgagcctcgccccatcggcacccgttacctcacccgtaatctgtaa

SEQ ID NO: 398 - protein, 738 aa, Artificial Sequence; identical to SEQ ID NO: 16
  Description of Artificial Sequence: Synthetic polypeptide

SEQ ID NO: 399 - DNA, 3129 bp, Artificial Sequence
  Description of Artificial Sequence: Synthetic polynucleotide
gaattcgccctttctacggctgcgtcaactggaccaatgagaactttcccttcaacgattgcgtcgacaagatggtgatctggtgggaggagggcaagatgacggccaaggtcgtggagtccgccaaggccattctcggcggcagcaaagtgcgcgtggaccaaaagtgcaagtcgtccgcccagatcgaccccacccccgtgatcgtcacctccaacaccaacatgtgcgccgtgattgacgggaacagcaccaccttcgagcaccagcagccgttgcaggaccggatgttcaagtttgaactcacccgccgtctggagcacgactttggcaaggtgacaaagcaggaagtcagagagttcttccgctgggcgcaggatcacgtgaccgaggtggcgcacgagttctacgtcagaaagggtggagccaacaagagacccgcccccgatgacgcggataaaagcgagcccaagcgggcctgcccctcagtcgcggatccatcgacgtcagacgcggaaggagctccggtggactttgccgacaggtaccaaaacaaatgttctcgtcacgcgggcatgcttcagatgctgtttccctgcaaaacatgcgagagaatgaatcagaatttcaacatttgcttcacgcacgggaccagagactgttcagaatgtttccccggcgtgtcagaatctcaaccggtcgtcagaaaaaagacgtatcggaaactctgtgcgattcatcatctgctgggggcgggcacccgagattgcttgctcggcctgcgatctggtcaacgtggacctagatgactgtgtttctgagcaataaatgacttaaaccaggtatggctgccgatggttatcttccagattggctcgaggacaacctctctgagggcattcgcgagtggtgggacttgaaacctggagccccgaaacccaaagccaaccagcaaaagcaggacgacggccggggtctggtgcttcctggctacaagtacctcggacccttcaacggactcgacaagggggagcccgtcaacgcggcggacgcagcggccctcgagcacgacaaggcctacgaccagcagctcaaagcgggtgacaatccgtacctgcggtataaccacgccgacgccgagtttcaggagcgtctgcaagaagatacgtcttttgggggcaacctcgggcgagcagtcttccaggccaagaagcgggttctcgaacctctcggtctggttgaggaaggcgctaagacggctcctggaaagaagagaccggtagagccatcaccccagcgttctccagactcctctacgggcatcggcaagaaaggccagcagcccgcgaaaaagagactcaactttgggcagactggcgactcagagtcagtgcccgaccctcaaccaatcggagaaccccccgcaggcccctctggtctgggatctggtacaatggctgcaggcggtggcgctccaatggcagacaataacgaaggcgccgacggagtgggtagttcctcaggaaattggcattgcgattccacatggctgggcgacagagtcatcaccaccagcacccgaacctgggccctccccacctacaacaaccacctctacaagcaaatctccaacgggacttcgggaggaagcaccaacgacaacacctacttcggctacagcaccccctgggggtattttgactttaacagattccactgccacttctcaccacgtgactggcagcgactcatcaacaacaactggggattccggcccaagagactcaacttcaagctcttcaacatccaggtcaaggaggtcacgcagaatgaaggcaccaagaccatcgccaataaccttaccagcacgattcaggtctttacggactcggaataccagctcccgtacgtcctcggctctgcgcaccagggctgcctgcctccgttcccggcggacgtcttcatgattcctcagtacgggtacctgactctgaacaatggcagtcaggccgtgggccgttcctccttctactgcctggagtactttccttctcaaatgctgagaacgggcaacaactttgagttcagctaccagtttgaggacgtgccttttcacagcagctacgcgcacagccaaagcctggaccggctgatgaaccccctcatcgaccagtacctgtactacctgtctcggactcagtccacgggaggtaccgcaggaactcagcagttgctattttctcaggccgggcctaataacatgtcggctcaggccaaaaactggctacccgggccctgctaccggcagcaacgcgtctccacgacactgtcgcaaaataacaacagcaactttgcctggaccggtgccaccaagtatcatctgaatggcagagactctctggtaaatcccggtgtcgctatggcaacccacaaggacgacgaagagcgattttttccgtccagcggagtcttaatgtttgggaaacagggagctggaaaagacaacgtggactatagcagcgttatgctaaccagtgaggaagaaattaaaaccaccaacccagtggccacagaacagtacggcgtggtggccgataacctgcaacagcaaaacgccgctcctattgtaggggccgtcaacagtcaaggagccttacctggcatggtctggcagaaccgggacgtgtacctgcagggtcctatctgggccaagattcctcacacggacggaaactttcatccctcgccgctgatgggaggctttggactgaaacacccgcctcctcagatcctgattaagaatacacctgttcccgcggatcctccaactaccttcagtcaagctaagctggcgtcgttcatcacgcagtacagcaccggacaggtcagcgtggaaattgaatgggagctgcagaaagaaaacagcaaacgctggaacccagagattcaatacacttccaactactacaaatctacaaatgtggactttgctgttaacacagatggcacttattctgagcctcgccccatcggcacccgttacctcacccgtaatctgtaattgcttgttaatcaataaaccggttgattcgtttcagttgaactttggtctctgcgaagggcgaattc

SEQ ID NO: 400 - protein, 738 aa, Artificial Sequence; identical to SEQ ID NO: 16
  Description of Artificial Sequence: Synthetic polypeptide

SEQ ID NO: 401 - protein, 733 aa, Artificial Sequence
  Description of Artificial Sequence: Synthetic polypeptide
MAADGYLPDWLEDNLSEGIREWWDLRPGAPKPKANQQKQDDGRGLVLPGYKYLGPFNGLDKGEPVNEADAAALEHDKAYDKQLEQGDNPYLKYNHADAEFQERLQEDTSFGGNLGRAVFQAKKRVLEPLGLVEEGAKTAPGKKRPIESPDSSTGIGKKGQQPAKKRLNFGQTGDSESVPDPQPIGEPPAGPSGLGSGTMAAGGGAPMADNNEGADGVGSSSGNWHCDSTWLGDRVITTSTRTWALPTYNNHLYKQISNGTSGGSTNDNTYFGYSTPWGYFDFNRFHCHFSPRDWQRLINNNWGFRPKRLNFKLFNIQVKEVTQNEGTKTIANNLTSTIQVFTDSEYQLPYVLGSAHQGCLPPFPADVFMIPQYGYLTLNNGSQAVGRSSFYCLEYFPSQMLRTGNNFEFSYQFEDVPFHSSYAHSQSLDRLMNPLIDQYLYYLSRTQSTGGTAGTQQLLFSQAGPNNMSAQAKNWLPGPCYRQQRVSTTVSQNNNSNFAWTGATKYHLNGRDSLVNPGVAMATHKGDEERFFPSSGVLMFGKQGAGKDNVDYSSVMLTSEEEIKTTNPVATEQYGVVADNLQQQNAAPIVGAVNSQGALPGMVWQNRDVYLQGPIWAKIPHTDGNFHPSPLMGGFGLKHPPPQILIKNTPVPADPPTTFSQAKLASFITQYSTGQVSVEIEWELQKENSKRWNPEIQYTSNYYKSTNVDFAVNTEGTYSEPRPIGTRYLTRNL

SEQ ID NO: 402 - DNA, 2501 bp, Artificial Sequence
  Description of Artificial Sequence: Synthetic polynucleotide
gaattcgcccttggctgcgtcaactggaccaatgagaactttcccttcaacgattgcgtcgacaagatggtgatctggtgggaggagggcaagatgacggccaaggtcgtggagtccgccaaggccattcatcatctgctggggcgggctcccgagattgcttgctcggcctgcgatctggtcaacgtggacctggatgactgtgtttctgagcaataaatgacttaaaccaggtatggctgccgatggttatcttccagattggctcgaggacaacctctctgagggcattcgcgagtggtgggacttgagacctggagccccgaaacccaaagccaaccagcaaaagcaggacgacggccggggtctggtgcttcctggctacaagtacctcggacccttcaacggactcgacaagggagagccggtcaacgaggcagacgccgcggccctcgagcacgacaaggcctacgacaagcagctcgagcagggggacaacccgtacctcaagtacaaccacgccgacgccgagtttcaggagcgtcttcaagaagatacgtcttttgggggcaacctcgggcgagcagtcttccaggccaagaagcgggttctcgaacctctcggtctggttgaggaaggcgctaagacggctcctggaaagaagagacccatagaatcccccgactcctccacgggcatcggcaagaaaggccagcagcccgctaaaaagagactcaactttgggcagactggcgactcagagtcagtgcccgaccctcaaccaatcggagaaccccccgcaggcccctctggtctgggatctggcacaatggctgcaggcggtggcgctccaatggcagacaataacgaaggcgccgacggagtgggtagttcctcaggaaattggcattgcgattccacatggctgggcgacagagtcatcaccaccagcacccgaacctgggccctccccacctacaacaaccacctctacaagcaaatctccaacgggacatcgggaggaagcaccaacgacaacacctacttcggctacagcaccccctgggggtattttgactttaacagattccactgccacttctcaccacgtgactggcagcgactcatcaacaacaactggggattccggcccaagagactcaacttcaagctcttcaacatccaggtcaaggaggtcacgcagaatgaaggcaccaagaccatcgccaataaccttaccagcacgattcaggtctttacggactcggaataccagctcccgtacgtcctcggctctgcgcaccagggctgcctgcctccgttcccggcggacgtcttcatgattcctcagtacgggtacctgactctgaacaacggcagtcaggccgtgggccgttcctccttctactgcctggagtactttccttctcaaatgctgagaacgggcaacaactttgagttcagctaccagtttgaggacgtgccttttcacagcagctatgcgcacagccaaagcctggaccggctgatgaaccccctcatcgaccagtacctgtactacctgtctcggactcagtccacgggaggtaccgcaggaactcagcagttgctattttctcaggccgggcctaataacatgtcggctcaggccaaaaactggctacccgggccctgctaccggcagcaacgcgtctccacgacagtgtcgcaaaataacaacagcaactttgcttggaccggtgccaccaagtatcatctgaatggcagagactctctggtaaatcccggtgtcgctatggcaacgcacaagggcgacgaagagcgattttttccatccagcggagtcttgatgtttgggaaacagggagctggaaaagacaacgtagactatagcagcgttatgctaaccagtgaggaagaaatcaaaaccaccaacccagtggccacagaacagtacggcgtggtggccgataacctgcaacagcaaaacgccgctcctattgtaggggccgtcaacagtcaaggagccttacctggcatggtctggcagaaccgggacgtgtacctgcagggtcctatctgggccaagattcctcacacggacggcaactttcatccttcgccgctgatgggaggctttggactgaaacacccgcctcctcagatcctgattaagaatacacctgttcccgcggatcctccaactaccttcagtcaagccaagctggcgtcgttcatcacgcagtacagcaccggacaggtcagcgtggaaattgaatgggagctgcagaaagagaacagcaagcgctggaacccagagattcagtatacttccaactactacaaatctacaaatgtggactttgctgtcaatactgagggtacttattcagagcctcgccccattggcacccgttacctcacccgtaacctgtaattgcctgttaatcaataaaccggttgattcgtttcagttgaactttggtctcaagggcgaattc

SEQ ID NO: 403 - DNA, 2187 bp, Artificial Sequence
  Description of Artificial Sequence: Synthetic polynucleotide
atggctgccgatggttatcttccagattggctcgaggacaacctctctgagggcattcgcgagtggtgggacttgaaacctggagccccgaaacccaaagccaaccagcaaaagcaggacgacggccggggtctggtgcttcctggctacaagtacctcggacccttcaacggactcgacaagggagagccggtcaacgaggcagacgccgcggccctcgagcacgacaaggcctacgacaagcagctcgagcagggggacaacccgtacctcaagtacaaccacgccgacgccgagtttcaggagcgtcttcaagaagatacgtcttttgggggcaacctcgggcgagcagtcttccaggccaagaagcgggttctcgaacctctcggtctggttgaggaaggcgctaagacggctcctggaaagaagagacccatagaatcccccgactcctccacgggcatcggcaagaaaggccagcagcccgctaaaaagaagctcaactttgggcagactggcgactcagagtcagtgcccgacccccaacctctcggagaacctcccgccgcgccctcaggtctgggatctggtacaatggctgcaggcggtggcgcaccaatggcagacaataacgaaggcgccgacggagtgggtaatgcctccggaaattggcattgcgattccacatggctgggcgacagagtcatcaccaccagcacccgcacctgggccctgcccacctacaacaaccacctctacaagcagatatcaagtcagagcggggctaccaacgacaaccacttcttcggctacagcaccccctggggctattttgacttcaacagattccactgccacttctcaccacgtgactggcagcgactcatcaacaacaactggggattccggcccagaaagctgcggttcaagttgttcaacatccaggtcaaggaggtcacgacgaacgacggcgttacgaccatcgctaataaccttaccagcacgattcaggtcttctcggactcggagtaccaactgccgtacgtcctcggctctgcgcaccagggctgcctccctccgttccctgcggacgtgttcatgattcctcagtacggatatctgactctaaacaacggcagtcagtctgtgggacgttcctccttctactgcctggagtactttccttctcagatgctgagaacgggcaataactttgaattcagctacacctttgaggaagtgcctttccacagcagctatgcgcacagccagagcctggaccggctgatgaatcccctcatcgaccagtacctgtactacctggcccggacccagagcactacggggtccacaagggagctgcagttccatcaggctgggcccaacaccatggccgagcaatcaaagaactggctgcccggaccctgttatcggcagcagagactgtcaaaaaacatagacagcaacaacaacagtaactttgcctggaccggggccactaaataccatctgaatggtagaaattcattaaccaacccgggcgtagccatggccaccaacaaggacgacgaggaccagttctttcccatcaacggagtgctggtttttggcgaaacgggggctgccaacaagacaacgctggaaaacgtgctaatgaccagcgaggaggagatcaaaaccaccaatcccgtggctacagaagaatacggtgtggtctccagcaacctgcaatcgtctacggccggaccccagacacagactgtcaacagccagggggctctgcccggcatggtctggcagaaccgggacgtgtacctgcagggtcccatctgggccaaaattcctcacacggacggcaactttcacccgtctcccctgatgggcggatttggactcaaacacccgcctcctcaaattctcatcaaaaacaccccggtacctgctaatcctccagaggtgtttactcctgccaagtttgcctcatttatcacgcagtacagcaccggccaggtcagcgtggagatcgagtgggaactgcagaaagaaaacagcaaacgctggaatccagagattcagtacacctcaaattatgccaagtctaataatgtggaatttgctgtcaacaacgaaggggtttatactgagcctcgccccattggcacccgttacctcacccgtaacctgtaa

SEQ ID NO: 404 - protein, 728 aa, Artificial Sequence; identical to SEQ ID NO: 72
  Description of Artificial Sequence: Synthetic polypeptide

SEQ ID NO: 405 - protein, 728 aa, Artificial Sequence; identical to SEQ ID NO: 164
  Description of Artificial Sequence: Synthetic polypeptide

SEQ ID NO: 406 - protein, 728 aa, Artificial Sequence; identical to SEQ ID NO: 164
  Description of Artificial Sequence: Synthetic polypeptide

SEQ ID NO: 407 - protein, 733 aa, Artificial Sequence
  Description of Artificial Sequence: Synthetic polypeptide
MAADGHLPDWLEDNLSEGIREWWDLKPGAPKPKANQQKQDDGRGLVLPGYKYLGPFNGLDKGEPVNAADAAALEHDKAYDQQLKAGDNPYLRYNHADAEFQERLQEDTSFGGNLGRAVFQAKKRVLEPLGLVEEGAKTAPGKKRPIESPDSSTGIGKKGQQPAKKKLNFGQTGDSESVPDPQPIGEPPAGPSGLGSGTMAAGGGAPMADNNEGADGVGSSSGNWHCDSTWLGDRVITTSTRTWALPTYNNHLYKQISNGTSGGSTNDNTYFGYSTPWGYFDFNRFHCHFSPRDWQRLINNSWGFRPKRLNFKLFNIQVKEVTQNEGTKTIANNLTSTIQVFTDSEYQLPYVLGSAHQGCLPPFPADVFMIPQYGYLTLNNGSQAVGRSSFYCLEYFPSQMLRTGNNFEFSYQFEDVPFHSSYAHSQSLDRLMNPLIDQYLYYLSRTQSTGGTAGTQQLLFSQAGPNNMSAQAKNWLPGPCYRQQRVSTTLSQNNNSNFAWTGATKYHLNGRDSLVNPGVAMATHKDDEERFFPSSGVLMFGKQGAGKDNVDYSSVMLTSEEEIKTTNPVATEQYGVVADNLQQQNAAPIVGAVNSQGALPGMVWQNRDVYLQGPIWAKIPHTDGNFHPSPLMGGFGLKHPPPQILIKNTPVPADPPTTFSQAKLASFITQYSTGQVSVEIEWELQKENSKRWNPEIQYTSNYYKSTNVDFAVNTEGTYSEPRPIGTRYLTRNL

SEQ ID NO: 408 - DNA, 3113 bp, Artificial Sequence
  Description of Artificial Sequence: Synthetic polynucleotide
gaattcgccctttctacggctgcgtcaactggaccaatgagaactttcccttcaacgattgcgtcgacaagatggtgatctggtgggaggagggcaagatgacggccaaggtcgtggagtccgccaaggccattctcggcggcagcaaggtgcgcgtggaccaaaagtgcaagtcgtccgcccagatcgatcccacccccgtgatcgtcacttccaacaccaacatgtgcgccgtgattgacgggaacagcaccaccttcgagcaccagcagccgttacaagaccggatgttcaaatttgaactcacccgccgtctggagcatgactttggcaaggtgacaaagcaggaagtcaaagagttcttccgctgggcgcaggatcacgtgaccgaggtggcgcatgagttctacgtcagaaagggtggagccaacaagagacccgcccccgatgacgcggataaaagcgagcccaagcgggcctgcccctcagtcgcggatccatcgacgtcagacgcggaaggagctccggtggactttgccgacaggtaccaaaacaaatgttctcgtcacgcgggcatgcttcagatgctgcttccctgcaagacatgcgagagaatgaatcagaatttcagcatttgcttcacgcacgggaccagagactgttcagaatgtttccccggcgtgtcagaatctcaaccggtcgtcagaaagaggacgtatcggaaactctgtgccattcatcatctgctggggcgggctcccgagattgcttgctcggcctgcgatctggtcaacgtggacctggatgactgtgtttctgagcaataaatgacttaaaccaggtatggctgccgatggtcatcttccagattggctcgaggacaacctctctgagggcattcgcgagtggtgggacttgaaacctggagccccgaaacccaaagccaaccagcaaaagcaggacgacggccggggtctggtgcttcctggctacaagtacctcggacccttcaacggactcgacaagggggagcccgtcaacgcggcggacgcagcggccctcgagcacgacaaggcctacgaccagcagctcaaagcgggtgacaatccgtacctgcggtataaccacgccgacgccgagtttcaggagcgtcttcaagaagatacgtcttttgggggcaacctcgggcgagcagtcttccaggccaagaagcgggttctcgaacctctcggtctggttgaggaaggcgctaagacggctcctggaaagaagagacccatagaatcccccgactcctccacgggcatcggcaagaaaggccagcagcccgctaaaaagaagctcaactttgggcagactggcgactcagagtcagtgcccgaccctcaaccaatcggagaaccccccgcaggcccctctggtctgggatctggtacaatggctgcaggcggtggcgctccaatggcagacaataacgaaggcgccgacggagtgggtagttcctcaggaaattggcattgcgattccacatagctgggcgacagagtcatcaccaccagcacccgaacctgggccctccccacctacaacaaccacctctacaagcaaatctccaacgggacatcgggaggaagcaccaacgacaacacctacttcggctacagcaccccctgggggtattttgactttaacagattccactgccacttctcaccacgtgactggcagcgactcatcaacaacagctggggattccggcccaagagactcaacttcaagctcttcaacatccaggtcaaggaggtcacgcagaatgaaggcaccaagaccatcgccaataaccttaccagcacgattcaggtctttacggactcggaataccagctcccgtacgtcctcggctctgcgcaccagggctgcctgcctccgttcccggcggacgtcttcatgattcctcagtacgggtacctgactctgaacaacggcagtcaggccgtgggccgttcctccttctactgcctggagtactttccttctcaaatgctgagaacgggcaacaactttgagttcagctaccagtttgaggacgtgccttttcacagcagctacgcgcacagccaaagcctggaccggctgatgaaccccctcatcgaccagtacctgtactacctgtctcggactcagtccacgggaggtaccgcaggaactcagcagttgctattttctcaggccgggcctaataacatgtcggctcaggccaaaaactggctacccgggccctgctaccggcagcaacgcgtctccacgacactgtcgcaaaataacaacagcaactttgcttggaccggtgccaccaagtatcatctgaatggcagagactctctggtaaatcccggtgtcgctatggcaacgcacaaggacgacgaagagcgattttttccatccagcggagtcttgatgtttgggaaacagggagctggaaaagacaacgtggactatagcagcgttatgctaaccagtgaggaagaaatcaaaaccaccaacccagtggccacagaacagtacggcgtggtggccgataacctgcaacagcaaaacgccgctcctattgtaggggccgtcaacagtcaaggagccttacctggcatggtctggcagaaccgggacgtgtacctgcagggtcctatctgggccaagattcctcacacggacggcaactttcatccttcgccgctgatgggaggctttggactgaaacacccgcctcctcagatcctgattaagaatacacctgttcccgcggatcctccaactaccttcagtcaagccaagctggcgtcgttcatcacgcagtacagcaccggacaggtcagcgtggaaattgaatgggagctgcagaaagagaacagcaagcgctggaacccagagattcagtatacttccaactactacaaatctacaaatgtggactttgctgtcaatactgagggtacttattcagagcctcgccccattggcacccgttacctcacccgtaacctgtaattgcctgttaatcaataaaccggttaattcgtttcagttgaactttggtctctgcgaagggcgaattc

SEQ ID NO: 409 - protein, 731 aa, Artificial Sequence
  Description of Artificial Sequence: Synthetic polypeptide
MAADGYLPDWLEDNLSEGIREWWDLKPGAPKPKANQQKQDDGRGLVLPGYKYLGPFNGLDKGEPVNEADAAALEHDKAYDKQLEQGDNPYLKYNHADAEFQERLQEDTSFGGNLGRAVFRAKKRVLEPLGLVEEGAKTAPGKKRPIESPDSSTGIGKKGQQPAKKKLNFGQTGDSESVPDPQPLGEPPAAPSGLGSGTMAAGGGAPMADNNEGADGVGNASGNWHCDSTWLGDRVITTSTRTWALPTYNNHLYKQISSQSGATNDNHFFGYSTPWGYFDFNRFHCHFSPRDWQRLINNNRGFRPRKLRFKLFNIQVKEVTTNDGVTTIANNLTSTIQVFSDSEYQLPYVLGSAHQGCLPPFPADVFMIPQYGYLTLNNGSQSVGRSSFYCLEYFPSQMLRTGNNFEFSYQFEDVPFHSSYAHSQSLDRLMNPLIDQYLYYLSRTQSTGGTAGTQQLLFSQAGPNNMSAQAKNWLPGPCYRQQRVSTTLSQNNNSNFAWTGATKYHLNGRDSLVNPGVAMATHKDDEERFFPSSGVLMFGKQGAGKDNVDYSSVMLTSEEEIKTTNPVATEQYGVVADNLQQQNAAPIVGAVNSQGALPGMAWQNRDVYLQGPIWAKIPHTDGNFHPSPLMGGFGLKHPPPQILIKNTPVPADPPTTFSQAKLASFITQYSTGQVSVEIEWELQKENSKRWNPEIQYTSNYYKSTNVDFAVNTEGTYSEPRPIGTRYLTRNL

SEQ ID NO: 410 - DNA, 3106 bp, Artificial Sequence
  Description of Artificial Sequence: Synthetic polynucleotide
gaattcgcccttctacggctgcgtcaactggaccaatgagaactttcccttcaacgattgcgtcgacaagatggtgatctggtgggaggagggcaagatgacggccaaggtcgtggagtccgccaaggccattctcggcggcagcaaggtgcgcgtggaccaaaagtgcaagtcgtccgcccagatcgaccccacccccgtgatcgtcacctccaacaccaacatgtgcgccgtgattgacgggaacagcaccaccttcgagcaccagcagccgttgcaggaccggatgttcaaatttgaactcacccgccgtctggagcatgactttggcaaggcgacaaagcaggaagtcaaagagttcttccgctgggcgcaggatcacgtgaccgaggtggcgcatgagttctacgtcagaaagggtggagccaacaagagacccgcccccgatgacgcggataaaagcgagcccaagcgggcccgcccctcagtcgcggatccatcgacgtcagacgcggaaggagctccggtggactttgccgacaggtaccaaaacaaatgttctcgtcacgcgggcatgcttcagatgctgtttccctgcaaaacatgcgagagaatgaatcagaatttcaacatttgcttcacgcacgggaccagagactgttcagaatgtttccccggcgtgtcagaatctcaaccggtcgtcagaaagaggacgtatcggaaactctgtgccattcatcatctgctggggcgggctcccgagattgcttgctcggcctgcgatctggtcaacgtggacctggatgactgtgtttctgagcaataaatgacttaaaccaggtatggctgccgatggttatcttccagattggctcgaggacaacctctctgagggcattcgcgagtggtgggacttgaaacctggagccccgaaacccaaagccaaccagcaaaagcaggacgacggccggggtctggtgcttcctggctacaagtacctcggacccttcaacggactcgacaagggagagccggtcaacgaggcagacgccgcggccctcgagcacgacaaggcctacgacaagcagctcgagcagggggacaacccgtacctcaagtacaaccacgccgacgccgagtttcaggagcgtcttcaagaagatacgtcttttgggggcaacctcgggcgagcagtcttccgggccaagaagcgggttctcgaacctctcggtctggttgaggaaggcgctaagacggctcctggaaagaagagacccatagaatcccccgactcctccacgggcatcggcaagaaaggccagcagcccgctaaaaagaagctcaactttgggcagactggcgactcagagtcagtgcccgacccccaacctctcggagaacctcccgccgcgccctcaggtctgggatctggtacaatggctgcaggcggtggcgcaccaatggcagacaataacgaaggcgccgacggagtgggtaatgcctccggaaattggcattgcgattccacatggctgggcgacagagtcatcaccaccagcacccgcacctgggccctgcccacctacaacaaccacctctacaagcagatatcaagtcagagcggggctaccaacgacaaccacttcttcggctacagcaccccctggggctattttgacttcaacagattccactgccacttctcaccacgtgactggcagcgactcatcaacaacaaccggggattccggcccagaaagctgcggttcaagttgttcaacatccaggtcaaggaggtcacgacgaacgacggcgttacgaccatcgctaataaccttaccagcacgattcaggtcttctcggactcggagtaccaactgccgtacgtcctcggctctgcgcaccagggctgcctccctccgttccctgcggacgtgttcatgattcctcagtacggatatctgactctaaacaacggcagtcagtctgtgggacgttcctccttctactgcctggagtactttccttctcagatgctgagaacgggcaataactttgaattcagctaccagtttgaggacgtgccctttcacagcagctacgcgcacagccaaagcctggaccggctgatgaaccccctcatcgaccagtacctgtactacctgtctcggactcagtccacgggaggtaccgcaggaactcagcagttgctattttctcaggccgggcctaataacatgtcggctcaggccaaaaactggctacccgggccctgctaccggcagcaacgcgtctccacgacactgtcgcaaaataacaacagcaactttgcttggaccggtgccaccaagtatcatctgaatggcagagactctctggtaaatcccggtgtcgctatggcaacgcacaaggacgacgaagagcgattttttccatccagcggagtcttgatgtttgggaaacagggagctggaaaagacaacgtggactatagcagcgttatgctaaccagtgaggaagaaatcaaaaccaccaacccagtggccacagaacagtacggcgtggtggccgataacctgcaacagcaaaacgccgctcctattgtaggggccgtcaacagtcaaggagccttacctggcatggcctggcagaaccgggacgtgtacctgcagggtcctatctgggccaagattcctcacacggacggcaactttcatccttcgccgctgatgggaggctttggactgaaacacccgcctcctcagatcctgattaagaatacacctgttcccgcggatcctccaactaccttcagtcaagccaagctggcgtcgttcatcacgcagtacagcaccggacaggtcagcgtggaaattgaatgggagctgcagaaagagaacagcaagcgctggaacccagagattcagtatacttccaactactacaaatctacaaatgtggactttgctgtcaatactgagggtacttattcagagcctcgccccattggcacccgttacctcacccgtaacctgtaattgcctgttaatcaataaaccggttaattcgtttcagttgaactttggtctctgcgaagggcgaattc

SEQ ID NO: 411 - protein, 738 aa, Artificial Sequence
  Description of Artificial Sequence: Synthetic polypeptide
MAADGYLPDWLEDNLSEGIREWWDLKPGAPKPKANQQKQDDGRGLVLPGYKYLGPFNGLDKGEPVNEADAAALEHDKAYDKQLEQGDNPYLKYNHADAEFQERLQEDTSFGGNLGRAVFQAKKRVLEPLGLVEEGAKTAPGKKRPVEPSPQRSPDSSTGIGKTGQQPAKKRLNFGQTGDSESVPDPQPIGEPPAGPSGLGSGTMAAGGGAPMADNNEGADGVGSSSGNWHCDSTWLGDRVITTSTRTWALPTYNNHLYKQISNGTSGGSTNDNTYFGYSTPWGYFDFNRFHCHFSPRDWQRLINNNWGFRPKRLNFKLFNIQVKEVTQNEGTKTIANNLTSTIQVFTDSEYQLPYVLGSAHQGCLPPFPADVFMIPQYGYLTLNNGSQAVGRSSFYCLEYFPSQMLRTGNNFEFSYQFEDVPFHSSYAHSQSLDRLMNPLIDQYLYYLSRTQSTGGTAGTQQLLFSQAGPNNMSAQAKNWLPGPCYRQQRVSTTLSQNNNSNFAWTGATKYHLNGRDSLVNPGVAMATHKDDEERFFPSSGVLMFGKQGAGKDNVDYSSVMLTSEEEIKTTNPVATEQYGVVADNLQQQNAAPIVGAVNSQGALPGMVWQNRDVYLQGPIWAKIPHTDGNFHPSPLMGGFGLKHPPPQILIKNTPVPADPPTTFSQAKLASFITQYSTGQVSVEIEWELQKENSKRWNPEIQYTSNYYKSTNVDFAVNTEGTYSEPRPIGTRYLTRNL

SEQ ID NO: 412 - DNA, 3197 bp, Artificial Sequence
  Description of Artificial Sequence: Synthetic polynucleotide
gaattcgccctttctacggctgcgtcaactggaccaatgagaactttcccttcaacgattgcgtcgacaagatggtgatctggtgggaggagggcaagatgacggccaaggtcgtggagtccgccaaggccattctcggcggcagcaaggtgcgcgtggaccaaaagtgcaagtcgtccgcccagatcgaccccacccccgtgatcgtcacctccaacaccaacatgtgcgccgtgattgacgggaacagcaccaccttcgagcaccagcagccgttacaagaccggatgttcaaatttgaactcacccgccgtctggagcacgactttggcaaggtgacaaagcaggaagtcaaagagttcttccgctgggcgcaggatcacgtgaccgaggtggcgcatgagttctacgtcagaaagggtggagccaacaagagacccgcccccgatgacgcggataaaagcgagcccaagcgggcctgcccctcagtcgcggatccatcgacgtcagacgcggaaggagctccggtggactttgccgacaggtaccaaaacaaatgttctcgtcacgcgggcatgcttcagatgctgtttccctgcaagacatgcgagagaatgaatcagaatttcaacatttgcttcacgcacgggaccagagactgttcagaatgtttccccggcgtgtcagaatctcaaccggtcgtcagaaagaggacgtatcggaaactctgtgccattcatcatctgctggggcgggctcccgagattgcttgctcggcctgcgatctggtcaacgtggacctggatgactgtgtttctgagcaataaatgacttaaaccaggtatggctgccgatggttatcttccagattggctcgaggacaacctctctgagggcattcgcgagtggtgggacttgaaacctggagccccgaaacccaaagccaaccagcaaaagcaggacgacggccggggtctggtgcttcctggctacaagtacctcggacccttcaacggactcgacaagggagagccggtcaacgaggcagacgccgcggccctcgagcacgacaaggcctacgacaagcagctcgagcagggggacaacccgtacctcaagtacaaccacgccgacgccgagtttcaggagcgtcttcaagaagatacgtcttttgggggcaacctcgggcgagcagtcttccaggccaagaagcgggttctcgaacctctcggtctggttgaggaaggcgctaagacggctcctggaaagaagagaccggtagagccatcaccccagcgttctccagactcctctacgggcatcggcaagacaggccagcagcccgcgaaaaagagactcaactttgggcagactggcgactcagagtcagtgcccgaccctcaaccaatcggagaaccccccgcaggcccctctggtctgggatctggtacaatggctgcaggcggtggcgctccaatggcagacaataacgaaggcgccgacggagtgggtagttcctcaggaaattggcattgcgattccacatggctgggcgacagagtcatcaccaccagcacccgaacctgggccctccccacctacaacaaccacctctacaagcaaatctccaacgggacatcgggaggaagcaccaacgacaacacctacttcggctacagcaccccctgggggtattttgactttaacagattccactgccacttctcaccacgtgactggcagcgactcatcaacaacaactggggattccggcccaagagactcaacttcaagctcttcaacatccaggtcaaggaggtcacgcagaatgaaggcaccaagaccatcgccaataaccttaccagcacgattcaggtctttacggactcggaataccagctcccgtacgtcctcggctctgcgcaccagggctgcctgcctccgttcccggcggacgtcttcatgattcctcagtacgggtacctgactctgaacaacggcagtcaggccgtgggccgttcctccttctactgcctggagtactttccttctcaaatgctgagaacgggcaacaactttgagttcagctaccagtttgaggacgtgccttttcacagcagctacgcgcacagccaaagcctggaccggctgatgaaccccctcatcgaccagtacctgtactacctgtctcggactcagtccacgggaggtaccgcaggaactcagcagttgctattttctcaggccgggcctaataacatgtcggctcaggccaaaaactggctacccgggccctgctaccggcagcaacgcgtctccacgacactgtcgcaaaataacaacagcaactttgcttggaccggtgccaccaagtatcatctgaatggcagagactctctggtaaatcccggtgtcgctatggcaacgcacaaggacgacgaagagcgattttttccatccagcggagtcttgatgtttgggaaacagggagctggaaaagacaacgtggactatagcagcgttatgctaaccagtgaggaagaaatcaaaaccaccaacccagtggccacagaacagtacggcgtggtggccgataacctgcaacagcaaaacgccgctcctattgtaggggccgtcaacagtcaaggagccttacctggcatggtctggcagaaccgggacgtgtacctgcagggtcctatctgggccaagattcctcacacggacggcaactttcatccttcgccgctgatgggaggctttggactgaaacacccgcctcctcagatcctgattaagaatacacctgttcccgcggatcctccaactaccttcagtcaagccaagctggcgtcgttcatcacgcagtacagcaccggacaggtcagcgtggaaattgaatgggagctgcagaaagagaacagcaagcgctggaacccagagattcagtatacttccaactactacaaatctacaaatgtggactttgctgtcaatactgagggtacttattcagagcctcgccccattggcacccgttacctcacccgtaacctgtaattgcctgttaatcaataaaccggttaattcgtttcagttgaactttggtctctgcgaagggcgaattcgtttaaacctgcaggactagtccctttagtgagggttaattctgagcttggcgtaatcatgggtcatag

SEQ ID NO: 413 - protein, 735 aa, Artificial Sequence
  Description of Artificial Sequence: Synthetic polypeptide
MAADGYLPDWLEDNLSEGIREWWDLKPGAPKPKANQQKQDDGRGLVLPGYKYLGPFNGLDKGEPVNEADAAALEHDKAYDKQLEQGDNPYLKYNHADAEFQERLQEDTSFGGNLGRAVFQAKKRVLEPLGLVEEGAKTAPGKKRPVEPSPQRSPDSSTGIGKTGQQPAKKRLNFGQTGDSESVPDPQPIGEPPAGPSGLGSGTMAAGGGAPMADNNEGADGVGSSSGNWHCDSTWLGDRVITTSTRTWALPTYNNHLYKQISNGTSGGSTNDNTYFGYSTPWGYFDFNRFHCHFSPRDWQRLINNNWGFRPRKLRFKLFNIQVKEVTTDDGVTTIANNLTSTIQVFSDSEYQLPYVLGSAHQGCLPPFPADVFMIPQYGYLTLNNGSQSVGRSSFYCLEYFPSQMLRTGNNFEFSYTFEEVPFHSSYAHSQSLDRLMNPLIDQYLYYLARTQSTTGSTRELQFHQAGPNTMAEQSKNWLPGPCYRQQRLSKNIDSNNNSNFAWTGATKYHLNGRNSLTNPGVAMATNKDDEDQFFPINGVLVFGKTGAANKTTLENVLMTSEEEIKTTNPVATEEYGVVSSNLQSSTAGPQTQTVNSQGALPGMVWQNRDVYLQGPIWAKIPHTDGNFHPSPLMDGFGLKHPPPQILIKNTPVPANPPEVFTPAKFASFITQYSTGQVSVEIEWELQKENSKRWNPEIQYTSNYAKSNNVEFAVNNEGVYTEPRPIGTRYLTRNL

SEQ ID NO: 414 - DNA, 3276 bp, Artificial Sequence
  Description of Artificial Sequence: Synthetic polynucleotide
gaattcgcccttcgcagagaccaaagttcaactgaaacgaattaaccggtttattgattaacaggcaattacaggttacgggtgaggtaacgggtgccaatggggcgaggctcagtataaaccccttcgttgttgacagcaaattccacattattagacttggcataatttgaggtgtactgaatctctggattccagcgtttgctgttttctttctgcagttcccactcgatctccacgctgacctggccggtgctgtactgcgtgataaatgaggcaaacttggcaggagtaaacacctctggaggattagcaggtaccggggtgtttttgatgagaatttgaggaggcgggtgtttgagtccaaatccgtccatcaggggagacgggtgaaagttgccgtccgtgtgaggaattttggcccagatgggaccctgcaggtacacgtcccggttctgccagaccatgccgggcagagccccctggctgttgacagtctgtgtctggggtccggccgtagacgattgcaggttgctggagaccacaccgtattcttctgtagccacgggattggtggttttgatctcctcctcgctggtcattagcacgttttccagcgttgtcttgttggcagcccccgttttgccaaaaaccagcactccgttgatgggaaagaactggtcctcgtcgtccttgttggtggccatggctacgcccgggttggttaatgaatttctaccattcagatggtatttagtggccccggtccaggcaaagttactgttgttgttgctgtctatgttttttgacagtctctgctgccgataacagggtccgggcagccagttctttgattgctcggccatggtgttgggcccagcctgatggaactgcagctcccttgtggaccccgtagtgctctgggtccgggccaggtagtacaggtactggtcgatgaggggattcatcagccggtccaggctctggctatgcgcatagctgctgtggaaaggcacttcctcaaaggtgtagctgaattcaaagttattgcccgttctcagcatctgagaaggaaagtactccaggcagtagaaggaggaacgtcccacagactgactgccgttgtttagagtcagatatccgtactgaggaatcatgaacacgtccgcagggaacggagggaggcagccctggtgcgcagagccgaggacgtacggcagttggtactccgagtccgagaagacctgaatcgtgctggtaaggttattagcgatggtcgtaacgccgtcgtccgtcgtgacctccttgacctggatgttgaacaacttgaaccgcagctttctgggccggaatccccagttgttgttgatgagtcgctgccagtcacgtggtgagaagtggcagtggaatctgttaaagtcaaaatacccccagggggtgctgtagccgaagtaggtgttgtcgttggtgcttcctcccgatgtcccgttggagatttgcttgtagaggtggttgttgtaggtggggagggcccaggttcgggtgctggtggtgatgactctgtcgcccagccatgtggaatcgcaatgccaatttcctgaggaactacccactccgtcggcgccttcgttattgtctgccattggagcgccaccgcctgcagccattgtaccagatcccagaccagaggggcctgcggggggttctccgattggttgagggtcgggcactgactctgagtcgccagtctgcccaaagttgagtctctttttcgcgggctgctggcctgtcttgccgatgcccgtagaggagtctggagaacgctggggtgatggctctaccggtctcttctttccaggagccgtcttagcgccttcctcaaccagaccgagaggttcgagaacccgcttcttggcctggaagactgctcgcccgaggttgcccccaaaagacgtatcttcttgaagacgctcctgaaactcggcgtcggcgtggttgtacttgaggtacgggttgtccccctgctcgagctgcttgtcgtaggccttgtcgtgctcgagggccgcggcgtctgcctcgttgaccggctctcccttgtcgagtccgttgaagggtccgaggtacttgtagccaggaagcaccagaccccggccgtcgtcctgcttttgctggttggctttgggtttcggggctccaggtttcaagtcccaccactcgcgaatgccctcagagaggttgtcctcgagccaatctggaagataaccatcggcagccatacctggtttaagtcatttattgctcagaaacacagtcatccaggtccacgttgaccagatcgcaggccgagcaagcaatctcgggagcccgccccagcagatgatgaatggcacagagtttccgatacgtcctctttctgacgaccggttgagattctgacacgccggggaaacattctgaacagtctctggtcccgtgcgtgaagcaaatgttgaaattctgattcattctctcgcatgtcttgcagggaaacagcatctgaagcatgcccgcgtgacgagaacacttgttttggtacctgtcggcaaagtccaccggagctccttccgcgtctgacgtcgatggatgcaaaatgtcgcaaaagcactcacgtgacagctaatacaggaccactcccctatgacgtgatttacgtcagcgctatgcccgcgtgacgagaacatttgttttggtacctgtcggcaaagtccaccggagctccttccgcgtctgacgtcgatggatccgcgactgaggggcaggcccgcttgggctcgcttttatccgcgtcatcgggggcgggtctcttgttggctccaccctttctgacgtagaactcatgcgccacctcggtcacgtgatcctgcgcccagcggaagaactctttgacttcctgctttgtcaccttgccaaagtcatgctccagacggcgggtgagttcaaatttgaacatccggtcctgcaacggctgctggtgctcgaaggtggtgctgttcccgtcaatcacggcgcacatgttggtgttggaagtgacgatcacgggggtgggatcgatctgggcggaagacttgcacttttggtccacgcgcaccttgctgccgccgagaatggccttggcggactccacgaccttggccgtcatcttgccctcctcccaccagatcaccatcttgtcgacgcaatcgttgaagggaaagttctcattggtccagttgacgcagccgtagaaagggcgaattc

SEQ ID NO: 415 - protein, 738 aa, Artificial Sequence; identical to SEQ ID NO: 80
  Description of Artificial Sequence: Synthetic polypeptide

SEQ ID NO: 416 - protein, 738 aa, Artificial Sequence
  Description of Artificial Sequence: Synthetic polypeptide
MAADGYLPDWLEDNLSEGIREWWDLKPGAPKPKANQQKQDDGRGLVLPGYKYLGPFNGLDKGEPVNAADAAALEHDKAYDQQLKAGDNPYLRYNHADAEFQERLQEDTSFGGNLGRAVFQAKKRVLEPLGLVEEGAKTAPGKKRPVEPSPQRSPDSSTGIGKKGHQPARKRLNFGQTGDSESVPDPQPIGEPPAGPSGLGSGTMAAGGGAPMADNNEGADGVGSSSGNWHCDSTWLGDRVITTSTRTWALPTYNNHLYKQISNGTSGGSTNDNTYFGYSTPWGYFDFNRFHCHFSPRDWQRLINNNWGFRPKRLNFKLFNIQVKEVTQNEGTKTIANNLTSTIQVFTDSEYQLPYVPGSAHQGCLPPFPADVFMIPQYGYLTLNNGSQAVGRSSFYCLEYFPSQMLRTGNNFEFSYTFEDVPFHSSYAHSQSLDRLMNPLIDQYLYYLSRTQSTGGTQGTQQLLFSQAGPANMSAQAKNWLPGPCYRQQRVSTTLSQNNNSNFAWTGATKYHLNGRDSLVNPGVAMATHKDDEERFFPSSGVLMFGKQGAGKDNVDYSSVMLTSEEEIKTTNPVATEQYGVVADNLQQTNGAPIVGTVNSQGALPGMVWQNRDVYLQGPIWAKIPHTDGNFHPSPLMGGFGLKHPPPQILIKNTPVPADPPTTFSQAKLASFITQYSTGQVSVEIEWELQKENSKRWNPEIQYTSNYYKSTNVDFAVNTEGTYSEPRPIGTRYLTRNL

SEQ ID NO: 417 - protein, 738 aa, Artificial Sequence; identical to SEQ ID NO: 78
  Description of Artificial Sequence: Synthetic polypeptide

SEQ ID NO: 418 - protein, 728 aa, Artificial Sequence
  Description of Artificial Sequence: Synthetic polypeptide
MAADGYLPDWLEDNLSEGIREWWDLKPGAPKPKANQQKQDDGRGLVLPGYKYLGPFNGLDKGEPVNEADAAALEHDKAYDKQLEQGDNPYLKYNHADAEFQERLQEDTSFGGNLGRAVFQAKKRVLEPLGLVEEGAKTAPGKKRPIESPDSSTGIGRKGQQPAKKKLNFGQTGDSESVPDPQPIGEPPAGPSGLGSGTMAAGGGAPMADNNEGADGVGNASGNWHCDSTWLGDRVITTSTRTWALPTYNNHLYKQISSQSGATNDNHFFGYSTPWGYFDFNRFHCHFSPRDWQRLINNNWGFRPRKLRFKLFNIQVKEVTTNDGVTTIANNLTSTIQVFSDSEYQLPYVLGSAHQGCLPPFPADVFMIPQYGYLTLNNGSQSVGRSSFYCLEYFPSQMLRTGNNFEFSYTFEEVPFHSSYAHSQSLDRLMNPLIDQYLYYLARTQSTTGSTRELQFHQAGPNTMAEQSKNWLPGPCYRQQRLSKNIDSNNNSNFAWTGATKYHLNGRNSLTNPGVAMATNKDDEDQFFPINGVLVFGKTGAANKTTLENVLMTSEEEIKTTNPVATEEYGVVSSNLQSSTAGPQTQTVNSQGALPGMVWQNRDVYLQGPIWAKIPHTDGNFHPSPLMGGFGLKHPPPQILIKNTPVPANPPEVFTPAKFASFITQYSTGQVSVEIEWELQKENSKRWNPEIQYTSNYAKSNNVEFAVNNEGVYTEPRPIGTRYLTRNL

SEQ ID NO: 419 - DNA, 2489 bp, Artificial Sequence
  Description of Artificial Sequence: Synthetic polynucleotide
gaattcgccctttctacggctgcgtcaactggaccaatgagaactttcccttcaacgattgcgtcgacaagatggtgatctggtgggaggagggcaagatgacggccaaggtcgtgaagtccgccaaggccattcatcatctgctggggcgggctcccgagattgcttgctcggcctgcgatctggtcaacgtggacctggatgactgtgtttctgagcaataaatgacttaaaccaggtatggctgccgatggttatcttccagattggctcgaggacaacctctctgagggcattcgcgagtggtgggacttgaaacctggagccccgaaacccaaagccaaccagcaaaagcaggacgacggccggggtctggtgcttcctggctacaagtacctcggacccttcaacggactcgacaagggagagccggtcaacgaggcagacgccgcggccctcgagcacgacaaggcctacgacaagcagctcgagcagggggacaacccgtacctcaagtacaaccacgccgacgccgagtttcaggagcgtcttcaagaagatacgtcttttgggggcaacctcgggcgagcagtcttccaggccaagaagcgggttctcgaacctctcggtctggttgaggaaggcgctaagacggctcctggaaagaagagacccatagaatcccccgactcctccacgggcatcggcaggaaaggccagcagcccgctaaaaagaagctcaactttgggcagactggcgactcagagtcagtgcccgaccctcaaccaatcggagaaccccccgcaggcccctctggtctgggatctggtacaatggctgcaggcggtggcgctccaatggcagacaataacgaaggcgccgacggagtgggtaatgcctccggaaattggcattgcgattccacatggctgggcgacagagtcatcaccaccagcacccgcacctgggccctgcccacctacaacaaccacctctacaagcagatatcaagtcagagcggggctaccaacgacaaccacttcttcggctacagcaccccctggggctattttgacttcaacagattccactgccacttctcaccacgtgactggcagcgactcatcaacaacaactggggattccggcccagaaagctgcggttcaagttgttcaacatccaggtcaaggaggtcacgacgaacgacggcgttacgaccatcgccaataaccttaccagcacgattcaggtcttctcggactcggagtaccaactgccgtacgtcctcggctctgcgcaccagggctgcctccctccgttccctgcggacgtgttcatgattcctcagtacggatatctgactctaaacaacggcagtcagtctgtgggacgttcctccttctactgcctggagtactttccttctcagatgctgagaacgggcaataactttgaattcagctacacctttgaggaagtgcctttccacagcagctatgcgcacagccagagcctggaccggctgatgaatcccctcatcgaccagtacctgtactacctggcccggacccagagcactacggggtccacaagggagctgcagttccatcaggctgggcccaacaccatggccgagcaatcaaagaactggctgcccggaccctgttatcggcagcagagactgtcaaaaaacatagacagcaacaacaacagtaactttgcctggaccggggccactaaataccatctgaatggtagaaattcattaaccaacccgggcgtagccatggccaccaacaaggacgacgaggaccagttctttcccatcaacggagtgctggtttttggcaaaacgggggctgccaacaagacaacgctggaaaacgtgctaatgaccagcgaggaggagatcaaaaccaccaatcccgtggctacagaagaatacggtgtggtctccagcaacctgcaatcgtctacggccggaccccagacacagactgtcaacagccagggggctctgcccggcatggtctggcagaaccgggacgtgtacctgcagggtcccatctgggccaaaattcctcacacggacggcaactttcacccgtctcccctgatgggcggatttggactcaaacacccgcctcctcaaattctcatcaaaaacaccccggtacctgctaatcctccagaggtgtttactcctgccaagtttgcctcatttatcacgcagtacagcaccggccaggtcagcgtggagatcgagtgggaactgcagaaagaaaacagcaaacgctggaatccagagattcagtacacctcaaattatgccaagtctaataatgtggaatttgctgtcaacaacgaaggggtttatactgagcctcgccccattggcacccgttacctcacccgtaacctgtaattgcctgttaatcaataaaccggttaattcgtttcagttgaactttggtcaagggcgaattc

SEQ ID NO: 420 - protein, 728 aa, Artificial Sequence
  Description of Artificial Sequence: Synthetic polypeptide
MAADGYLPDWLEDNLSEGIREWWDLKPGAPKPKANQQKQDDGRGLVLPGYKYLGPFNGLDKGEPVNAADAAALEHDKAYDQQLKAGDNPYLRYNHADAEFQERLQEDTSFGGNLGRAVFQAKKRVLEPLGLVEEGAKTAPGKKRPIESPDSSTGIGKKGQQPAKKKLNFGQTGDSESVPDPQPIGEPPAGPSGLGSGTMAAGGGAPMADNNEGADGVGNASGNWHCDSTWLGDRVITTSTRTWALPTYNNHLYKQISSQSGATNDNHFFGYSTPWGYFDFNRFHCHFSPRDWQRLINNNWGFRPRKLRFKLFNIQVKEVTTNDGVTTIANNLTSTIQVFSDSEYQLPYVLGSAHQGCLPPFPADVFMIPQYGYLTLNNGSQSVGRSSFYCLEYFPSQMLRTGNNFEFSYTFEEVPFHSSYAHSQSLDRLMNPLIDQYLYYLARTQSTTGSTRELQFHQAGPNTMAEQSKNWLPGPCYRRQRLSKDIDSNNNSNFAWTGATKYHLNGRNSLTNPGVAMATNKDDEDQFFPINGVLVFGKTGAANKTTLENVLMTSEEEIKTTNPVATEEYGVVSSNLQSSTAGPQTQTVNSQGALPGMVWQNRDVYLQGPIWAKIPHTDGNFHPSPLMGGFGLKHPPPQILIKNTPVPANPPEVFTPAKFASFITQYSTGQVSVEIEWELQKENSKRWNPEIQYTSNYAKSNNVEFAVNNEGVYTEPRPIGTRYLTRNL

SEQ ID NO: 421 - DNA, 3098 bp, Artificial Sequence
  Description of Artificial Sequence: Synthetic polynucleotide
gaattcgccctttctacggctgcgtcaactggaccaatgagaactttcccttcaacgattgcgtcgacaagatggtgatctggtgggaggagggcaagatgacggccaaggtcgtggagtccgccaaggccattctcggcggcagcaaggtgcgcgtggaccaaaagtgcaagtcttccgcccagatcgatcccacccccgtgatcgtcacttccaacaccaacatgtgcgccgtgattgacgggaacagcaccaccttcgagcaccagcagccgttacaagaccggatgttcaaatttgaactcacccgccgtctggagcacgactttggcaaggtgacaaagcaggaagtcaaagagttcttccgctgggcgcaggatcacgtgaccgaggtggcgcatgagttctacgtcagaaagggtggagccaacaagagacccgcccccgatgacgcggataaaagcgagcccaagcgggcctgcccctcagtcgcggatccatcgacgtcagacgcggaaggagctccggtggactttgccgacaggtaccaaaacaaatgttctcgtcacgcgggcatgcttcagatgctgtttccctgcaagacatgcgagagaatgaatcagaatttcaacatttgcttcacgcacgggaccggagactgttcagaatgtttccccggcgtgtcagaatctcaaccggtcgtcagaaagaggacgtatcggaaactctgtgccattcatcatctgctggggcgggctcccgagattgcttgctcggcctgcgatctggtcaacgtggacctggatgactgtgtttctgagcaataaatgacttaaaccaggtatggctgccgatggttatcttccagattggctcgaggacaacctctctgagggcattcgcgagtggtgggacttgaaacctggagccccgaaacccaaagccaaccagcaaaagcaggacgacggccggggtctggtgcttcctggctacaagtacctcggacccttcaacggactcgacaagggagagccggtcaacgcggcggacgcagcggccctcgagcacgacaaggcctacgaccagcagctcaaagcgggtgacaatccgtacctgcggtataaccacgccgacgccgagtttcaggagcgtcttcaagaagatacgtcttttgggggcaacctcgggcgagcagtcttccaggccaagaagcgggttctcgaacctctcggtctggttgaggaaggcgctaagacggctcctggaaagaagagacccatagaatcccccgactcctccacgggcatcggcaagaaaggccagcagcccgctaaaaagaagctcaactttgggcagactggcgactcagagtcagtgcccgaccctcaaccaatcggagaaccccccgcaggcccctctggtctgggatctggtacaatggctgcaggcggtggcgctccaatggcagacaataacgaaggcgccgacggagtgggtaatgcctccggaaattggcattgcgattccacatggctgggcgacagagtcatcaccaccagcacccgcacctgggccctgcccacctacaacaaccacctctacaagcagatatcaagtcagagcggggctaccaacgacaaccacttcttcggctacagcaccccctggggctattttgacttcaacagattccactgccacttctcaccacgtgactggcagcgactcatcaacaacaactggggattccggcccagaaagctgcggttcaagttgttcaacatccaggtcaaggaggtcacgacgaacgacggcgttacgaccatcgctaataaccttaccagcacgattcaggtcttctcggactcggagtaccaactgccgtacgtcctcggctctgcgcaccagggctgcctccctccgttccctgcggacgtgttcatgattcctcagtacggatatctgactctaaacaacggcagtcagtctgtgggacgttcctccttctactgcctggagtactttccttctcagatgctgagaacgggcaataactttgaattcagctacacctttgaggaagtgcctttccacagcagctatgcgcacagccagagcctggaccggctgatgaatcccctcatcgaccagtacctgtactacctggcccggacccagagcactacggggtccacaagggagctgcagttccatcaggctgggcccaacaccatggccgagcaatcaaagaactggctgcccggaccctgttatcggcggcagagactgtcaaaagacatagacagcaacaacaacagtaactttgcctggaccggggccactaaataccatctgaatggtagaaattcattaaccaacccgggcgtagccatggccaccaacaaggacgacgaggaccagttctttcccatcaacggagtgctggtttttggcaaaacgggggctgccaacaagacaacgctggaaaacgtgctaatgaccagcgaggaggagatcaaaaccaccaatcccgtggctacagaagaatacggtgtggtctccagcaacctgcaatcgtctacggccggaccccagacacagactgtcaacagccagggggctctgcccggcatggtctggcagaaccgggacgtgtacctgcagggtcccatctgggccaaaattcctcacacggacggcaactttcacccgtctcccctgatgggcggatttggactcaaacacccgcctcctcaaattctcatcaaaaacaccccggtacctgctaatcctccagaggtgtttactcctgccaagtttgcctcatttatcacgcagtacagcaccggccaggtcagcgtggagatcgagtgggaactgcagaaagagaacagcaaacgctggaatccagagattcagtacacctcaaattatgccaagtctaataatgtggaatttgctgtcaacaacgaaggggtttatactgagcctcgccccattggcacccgttacctcacccgtaacctgtaattacttgttaatcaataaaccggttgattcgtttcagttgaactttggtctctgcgaagggcgaattc

SEQ ID NO: 422 - protein, 685 aa, Artificial Sequence
  Description of Artificial Sequence: Synthetic polypeptide
MAADGYLPDWLEDNLSEGIREWWDLKPGAPKPKANQQKQDDGRGLVLPGYKYLGPFNGLDKGEPVNEADAAALEHDKAYDKQLEQGDNPYLKYNHADAEFQERLQEDTSFGGNLGRAVFQAKKRVLEPLGLVEEGAKTAPGKKRPVEPSPQRSPDSSTGIGKTGQQPAKKRLNFGQTGDSESVPDPQPIGEPPAGPSGLGSGTMAAGGGAPMADNNEGADGVGSSSGNWHCDSTWLGDRVITTSTRTWALPTYNNHLYKQISNGTSGGSTNDNTYFGYSTPWGYFDFNRFHCHFSPRDWQRLINNNWGFRPKRLNFKLFNIQVKEVTQNEGTKTIANNLTSTIQVFTDSEYQLPYVLGSAHQGCLPPFPADVFMIPQYGYLTLNNGSQAVGRSSFYCLEYFPSQMLRTGNNFEFSYQFEDVPFHSSYAHSQSLDRLTNPLIDQYLYYLARTQSTTGSTRGLQFHQAGPNTMAEQSKNWLPGPCYRQQRLSKNIDSNNNSNFAWTGATKYHLNGRNSLTNPGVAMATNKDDEDQFFPINGVLVFGKTGAANKTTLENVLMTSEEEIKTTNPVATEEYGVVSSNLQSSTAGPQTQTVNSQGALPGMVWQNRDVYLQGPIWAKIPHTDGNFHPSPLMGGFGLKHPPPQILIKYTSNYYKSTNVDFAVNTEGTYSEPRPIGTRYLTRNL

SEQ ID NO: 423 - DNA, 2969 bp, Artificial Sequence
  Description of Artificial Sequence: Synthetic polynucleotide
gaattcgccctttctacggctgcgtcaactggaccaatgagaactttcccttcaacgattgcgtcgacaagatggtgatctggtgggaggagggcaagatgacggccaaggtcgtggagtccgccaaggccattctcggcggcagcaaggtgcgcgtggaccaaaagtgcaagtcgtccgcccagatcgaccccacccccgtgatcgtcacctccaacaccaacatgtgcgccgtgattgacgggaacagcaccaccttcgagcaccagcagccgttacaagaccggatgttcaaatttgaactcacccgccgtctggagcacgactttggcaaggtgacaaagcaggaagtcaaagagttcttccgctgggcgcaggatcacgtgaccgaggtggcgcatgagttctacgtcagaaagggtggagccaacaagagacccgcccccgatgacgcggataaaagcgagcccaagcgggcctgcccctcagtcgcggatccatcgacgtcagacgcggaaggagctccggtggactttgccgacaggtaccaaaacaaatgttctcgtcacgcgggcatgcttcagatgctgtttccctgcaagacatgcgagagaatgaatcagaatttcaacatttgcttcacgcacgggaccagagactgttcagaatgtttccccggcgtgtcagaatctcaaccggtcgtcagaaagaggacgtatcggaaactctgtgccattcatcatctgctggggcgggctcccgagattgcttgctcggcctgcgatctggtcaacgtggacctggatgactgtgtttctgagcaataaatgacttaaaccaggtatggctgccgatggttatcttccagattggctcgaggacaacctctctgagggcatccgcgagtggtgggacttgaaacctggagccccgaaacccaaagccaaccagcaaaagcaggacgacggccggggtctggtgcttcctggctacaagtacctcggacccttcaacggactcgacaagggagagccggtcaacgaggcagacgccgcggccctcgagcacgacaaggcctacgacaagcagctcgagcagggggacaacccgtacctcaagtacaaccacgccgacgccgagtttcaggagcgtcttcaagaagatacgtcttttgggggcaacctcgggcgagcagtcttccaggccaagaagcgggttctcgaacctctcggtctggttgaggaaggcgctaagacggctcctggaaagaagagaccggtagagccatcaccccagcgttctccagactcctctacgggcatcggcaagacaggccagcagcccgcgaaaaagagactcaactttgggcagactggcgactcagagtcagtgcccgaccctcaaccaatcggagaaccccccgcaggcccctctggtctgggatctggtacaatggctgcaggcggtggcgctccaatggcagacaataacgaaggcgccgacggagtgggtagttcctcaggaaattggcattgcgattccacatggctgggcgacagagtcatcaccaccagcacccgaacctgggccctccccacctacaacaaccacctctacaagcaaatctccaacgggacatcgggaggaagcaccaacgacaacacctacttcggctacagcaccccctgggggtattttgactttaacagattccactgccacttctcaccacgtgactggcagcgactcatcaacaacaactggggattccggcccaagagactcaacttcaagctcttcaacatccaggtcaaggaggtcacgcagaatgaaggcaccaagaccatcgccaataaccttaccagcacgattcaggtctttacggactcggaataccagctcccgtacgtcctcggctctgcgcaccagggctgcctgcctccgttcccggcggacgtcttcatgattcctcagtacgggtacctgactctgaacaacggcagtcaggccgtgggccgttcctccttctactgcctggagtactttccttctcaaatgctgagaacgggcaacaactttgagttcagctaccagtttgaggacgtgccttttcacagcagctacgcgcacagccaaagcctggaccggctgacgaaccccctcatcgaccagtacctgtactacctggcccggacccagagcactacggggtccacaagggggctgcagttccatcaggctgggcccaacaccatggccgagcaatcaaagaactggctgcccggaccctgttatcggcagcagagactgtcaaaaaacatagacagcaacaacaacagtaactttgcctggaccggggccactaaataccatctgaatggtagaaattcattaaccaacccgggcgtagccatggccaccaacaaggacgacgaggaccagttctttcccatcaacggagtgctggtttttggcaaaacgggggctgccaacaagacaacgctggaaaacgtgctaatgaccagcgaggaggagatcaaaaccaccaatcccgtggctacagaagaatacggtgtggtctccagcaacctgcaatcgtctacggccggaccccagacacagactgtcaacagccagggggctctgcccggcatggtctggcagaaccgggacgtgtacctgcagggtcccatctgggccaaaattcctcacacggacggcaactttcacccgtctcccctgatgggcggatttggactcaaacacccgcctcctcaaattctcatcaagtatacttccaactactacaaatctacaaatgtggactttgctgtcaatactgagggtacttattcagagcctcgccccattggcacccgttacctcacccgtaacctgtaattgcctgttaatcaataaaccggttaattcgtttcagttgaactttggtctctgcgaagggcgaattc

SEQ ID NO: 424 - protein, 733 aa, Artificial Sequence
  Description of Artificial Sequence: Synthetic polypeptide
MAADGYLPDWLEDNLSEGIREWWDLKPGAPKPKANQQKQDDGRGLVLPGYKYLGPFNGLDKGEPVNAADAAALEHDKAYDQQLKAGDNPYLRYNHADAEFQERLQEDTSFGGNLGRAVFQAKKRVLEPLGLVEEGAKTAPGKKRPIESPDSSTGIGKKGQQPAKKKLNFGQTGDSESVPDPQPIGEPPAGPSGLGSGTMAAGGGAPMADNNEGADGVGSSSGNWHCDSTWLGDRVITTSTRTWALPTYNNHLYKQISNGTSGGSTNDNTYFGYSTPWGYFDFNRFHCHFSPRDWQRLINNNWGFRPKRLNFKLFNIQVKEVTQNEGTKTIANNLTSTIQVFTDSEYQLPYVLGSAHQGCLPPFPADVFMIPQYGYLTLNNGSQAVGRSSFYCLEYFPSQMLRTGNNFEFSYQFEDVPFHSSYAHSQSLDRLMNPLIDQYLYYLSRTQSTGGTAGTQQLLFSQAGPNNMSAQAKNWLPGPCYRQQRVSTTVSQNNNSNFAWTGATKYHLNGRDSLVNPGVAMATHKGDEERFFPSSGVLMFGKQGAGKDNVDYSSVMLTSEEEIKTTNPVATEQYGVVADNLQQQNAAPIVGAVNSQGALPGMVWQNRDVYLQGPIWAKIPHTDGNFHPSPLMGGFGLKHPPPQILIKNTPVPADPPTTFSQAKLASFITQYSTGQVSVEIEWELQKENSKRWNPEIQYTSNYYKSTNVDFAVNTEGTYSEPRPIGTRYLTRSL

SEQ ID NO: 425 - DNA, 3113 bp, Artificial Sequence
  Description of Artificial Sequence: Synthetic polynucleotide
gaattcgccctttctacggctgcgtcaactggaccaatgagaactttcccttcaacgattgcgtcgacaagatggtgatctggtgggaggagggcaagatgacggccaaggtcgtggagtccgccaaggccattctcggcggcagcaaggtgcgcgtggaccaaaagtgcaagtcgtccgcccagatcgatcccacccccgtgatcgtcacttccaacaccaacatgtgcgccgtgattgacgggaacagcaccaccttcgagcaccagcagccgttacaagaccggatgttcaaatttgaactcacccgccgtctggagcatgactttggcaaggtgacaaagcaggaagtcaaagagttcttccgctgggcgcaggatcacgtgaccgaggtggcgcatgagttctacgtcagaaagggtggagccaacaagagacccgcccccgatgacgcggataaaagcgagcccaagcgggcctgcccctcagtcgcggatccatcgacgtcagacgcggaaggagctccggtggactttgccgacaggtaccaaaacaaatgttctcgtcacgcgggcatgcttcagatgctgtttccctgcaagacatgcgagagaatgaatcagaatttcaacatttgcttcacgcacgggaccagagactgttcagaatgtttccccggcgtgtcagaatctcaaccggtcgtcagaaagaggacgtatcggaaactctgtgccattcatcatctgctggggcgggctcccgagattgcttgctcggcctgcgatctggtcaacgtggacctggatgactgtgtttctgagcaataaatgacttaaaccaggtatggctgccgatggttatcttccagattggctcgaggacaacctctctgagggcattcgcgagtggtgggacttgaaacctggagccccgaaacccaaagccaaccagcaaaagcaggacgacggccggggtctggtgcttcctggctacaagtacctcggacccttcaacggactcgacaagggggagcccgtcaacgcggcggacgcagcggccctcgagcacgacaaggcctacgaccagcagctcaaagcgggtgacaatccgtacctgcggtataaccacgccgacgccgagtttcaggagcgtcttcaagaagatacgtcttttgggggcaacctcgggcgagcagtcttccaggccaagaagcgggttctcgaacctctcggtctggttgaggaaggcgctaagacggctcctggaaagaagagacccatagaatcccccgactcctccacgggcatcggcaagaaaggccagcagcccgctaaaaagaagctcaactttgggcagactggcgactcagagtcagtgcccgaccctcaaccaatcggagaaccccccgcaggcccctctggtctgggatctggtacaatggctgcaggcggtggcgctccaatggcagacaataacgaaggcgccgacggagtgggtagttcctcaggaaattggcattgcgattccacatggctgggcgacagagtcatcaccaccagcacccgaacctgggccctccccacctacaacaaccacctctacaagcaaatctccaacgggacatcgggaggaagcaccaacgacaacacctacttcggctacagcaccccctgggggtattttgactttaacagattccactgccacttctcaccacgtgactggcagcgactcatcaacaacaactggggattccggcccaagagactcaacttcaagctcttcaacatccaggtcaaggaggtcacgcagaatgaaggcaccaagaccatcgccaataaccttaccagcacgattcaggtctttacggactcggaataccagctcccgtacgtcctcggctctgcgcaccagggctgcctgcctccgttcccggcggacgtcttcatgattcctcagtacgggtacctgactctgaacaacggcagtcaggccgtgggccgttcctccttctactgcctggagtactttccttctcaaatgctgagaacgggcaacaactttgagttcagctaccagtttgaggacgtgccttttcacagcagctatgcgcacagccaaagcctggaccggctgatgaaccccctcatcgaccagtacctgtactacctgtctcggactcagtccacgggaggtaccgcaggaactcagcagttgctattttctcaggccgggcctaataacatgtcggctcaggccaaaaactggctacccgggccctgctaccggcagcaacgcgtctccacgacagtgtcgcaaaataacaacagcaactttgcttggaccggtgccaccaagtatcatctgaatggcagagactctctggtaaatcccggtgtcgctatggcaacgcacaagggcgacgaagagcgattttttccatccagcggagtcttgatgtttgggaaacagggagctggaaaagacaacgtggactatagcagcgttatgctaaccagtgaggaagaaatcaaaaccaccaacccagtggccacagaacagtacggcgtggtggccgataacctgcaacagcaaaacgccgctcctattgtaggggccgtcaacagtcaaggagccttacctggcatggtctggcagaaccgggacgtgtacctgcagggtcctatctgggccaagattcctcacacggacggcaactttcatccttcgccgctgatgggaggctttggactgaaacacccgcctcctcagatcctgattaagaatacacctgttcccgcggatcctccaactaccttcagtcaagccaagctggcgtcgttcatcacgcagtacagcaccggacaggtcagcgtggaaattgaatgggagctgcagaaagagaacagcaagcgctggaacccagagattcagtatacttccaactactacaaatctacaaatgtggactttgctgtcaatactgagggtacttattcagagcctcgccccattggcacccgttacctcacccgtagcctgtaattgcctgttaatcaataaaccggttgattcgtttcagttgaactttggtctctgcgaagggcgaattc

SEQ ID NO: 426 - protein, 738 aa, Artificial Sequence
  Description of Artificial Sequence: Synthetic polypeptide
MAADGYLPDWLEDNLSEGIREWWDLKPGAPKPKANQQKQDDGRGLVLPGYKYLGPFNGLDKGEPVNAADAAALEHDKAYDQQLKAGDNPYLRYNHADAEFQERLQEDTSFGGNLGRAVFQAKKRVLEPLGLVEEGAKTAPGKKRPVEPSPQRSPDSSTGIGKTGQQPAKKRLNFGQTGDSESVPDPQPIGEPPAGPSGLGSGTMAAGGGAPMADNNEGADGVGSSSGNWHCDSTWLGDRVITTSTRTWALPTYNNHLYKQISNGTSGGSTNDNTYFGYSTPWGYFDFNRFHCHFSPRDWQRLINNNWGFRPKRLNFKLFNIQVKEVTQNEGTKTIANNLTSTIQVFTDSEYQLPYVLGSAHQGCPPPFPADVFMIPQYGYLTLNNGSQAVGRSSFYCLEYFPSQMRRTGNNFEFSYQFEDVPFHSSYAHSQSLDRLMNPLIDQYLYYLSRTQSTGGTAGTQQLLFSQAGPNNMSAQAKNWLPGPCYRQQRVSTTLSQNNNSNFAWTGATKYHLNGRDSLVNPGVAMATHKDDEERFFPSSGVLMFGKQGAGKDNVDYSSVMLTSEEEIKTTNPVATEQYGVVADNLQQQNAAPIVGAVNSQGALPGMVWQNRDVYLQGPIWAKIPHTDGNFHPSPLMGGFGLKHPPPQILIKNTPVPADPPTTFSQAKLASFITQYSTGQVSVEIEWELQKENSKRWNPEIQYTSNYYKSTNVDFAVNTEGTYSEPRPIGTRYLTRNL

SEQ ID NO: 427 - DNA, 3128 bp, Artificial Sequence
  Description of Artificial Sequence: Synthetic polynucleotide
gaattcgccctttctacggctgcgtcaactggaccaatgagaactttcccttcaacgattgcgtcgacaagatggtgatctggtgggaggagggcaagatgacggccaaggtcgtggagtccgccaaggccattctcggcggcagcaaggtgcgcgtggaccaaaagtgcaagtcgtccgcccagatcgaccccacccccgtgatcgtcacctccaacaccaacatgtgcgccgtgattgacgggaacagcaccaccttcgagcaccagcagccgttgcaggaccggatgttcaaatttgaactcacccgccgtctggagcatgactttggcaaggtgacaaagcaggaagtcaaagagttcttccgctgggcgcaggatcacgtgaccgaggtggcgcatgagttctacgtcagaaagggtggagccaacaagagacccgcccccgatgacgcggataaaagcgagcccaagcgggcctgcccctcagtcgcggatccatcgacgtcagacgcggaaggagctccggtggactttgccgacaggtaccaaaacaaatgttctcgtcacgcgggcatgcttcagatgctgtttccctgcaagacatgcgagagaatgaatcagaatttcaacatttgcttcacgcgcgggaccagagactgttcagaatgtttcccgggcgtgtcagaatctcaaccggtcgtcagaaagaggacgtatcggaaactctgtgccattcatcatctgctggggcgggctcccgagattgcttgctcggcctgcgatctggtcaacgtggacctggatgactgtgtttctgagcaataaatgacttaaaccaggtatggctgccgatggttatcttccagattggctcgaggacaacctctctgagggcattcgcgagtggtgggacttgaaacctggagccccgaaacccaaagccaaccagcaaaagcaggacgacggccggggtctggtgcttcctggctacaagtacctcggacccttcaacggactcgacaagggggagcccgtcaacgcggcggacgcagcggccctcgagcacgacaaggcctacgaccagcagctcaaagcgggtgacaatccgtacctgcggtataaccacgccgacgccgagtttcaggagcgtctgcaagaagatacgtcttttgggggcaacctcgggcgagcagtcttccaggccaagaagcgggttctcgaacctctcggtctggttgaggaaggcgctaagacggctcctggaaagaagagaccggtagagccatcaccccagcgttctccagactcctctacgggcatcggcaagacaggccagcagcccgcgaaaaagagactcaactttgggcagactggcgactcagagtcagtgcccgaccctcaaccaatcggagaaccccccgcaggcccctctggtctgggatctggtacaatggctgcaggcggtggcgctccaatggcagacaataacgaaggcgccgacggagtgggtagttcctcaggaaattggcattgcgattccacatggctgggcgacagagtcatcaccaccagcacccgaacctgggccctccccacctacaacaaccacctctacaagcaaatctccaacgggacatcgggaggaagcaccaacgacaacacctacttcggctacagcaccccctgggggtattttgactttaacagattccactgccacttctcaccacgtgactggcagcgactcatcaacaacaactggggattccggcccaagagactcaacttcaagctcttcaacatccaggtcaaggaggtcacgcagaatgaaggcaccaagaccatcgccaataaccttaccagcacgattcaggtctttacggactcggaataccagctcccgtacgtcctcggctctgcgcaccagggctgcccgcctccgttcccggcggacgtcttcatgattcctcagtacgggtacctgactctgaacaacggcagtcaggccgtgggccgttcctccttctactgcctggagtactttccttctcaaatgcggagaacgggcaacaactttgagttcagctaccagtttgaggacgtgccttttcacagcagctacgcgcatagccaaagcctggaccggctgatgaaccccctcatcgaccagtacctgtactacctgtctcggactcagtccacgggaggtaccgcaggaactcagcagttgctattttctcaggccgggcctaataacatgtcggctcaggccaaaaactggctacccgggccctgctaccggcagcaacgcgtctccacgacactgtcgcaaaataacaacagcaactttgcttggaccggtgccaccaagtatcatctgaatggcagagactctctggtaaatcccggtgtcgctatggcaacgcacaaggacgacgaagagcgattttttccatccagcggagtcttgatgtttgggaaacagggagctggaaaagacaacgtggactatagcagcgttatgctaaccagtgaggaagaaatcaaaaccaccaacccagtggccacagaacagtacggcgtggtggccgataacctgcaacagcaaaacgccgctcctattgtaggggccgtcaacagtcaaggagccttacctggcatggtctggcagaaccgggacgtgtacctgcagggtcctatctgggccaagattcctcacacggacggcaactttcatccttcgccgctgatgggaggctttggactgaaacacccgcctcctcagatcctgattaagaatacacctgttcccgcggatcctccaactaccttcagtcaagccaagctggcgtcgttcatcacgcagtacagcaccggacaggtcagcgtggaaattgaatgggagctgcagaaagagaacagcaagcgctggaacccagagattcagtatacttccaactactacaaatctacaaatgtggactttgctgtcaatactgagggtacttattcagagcctcgccccattggcacccgttacctcacccgtaacctgtaattgcctgttaatcaataaaccggttaattcgtttcagttgaactttggtctctgcgaagggcgaattc

SEQ ID NO: 428 - protein, 738 aa, Artificial Sequence; identical to SEQ ID NO: 416
  Description of Artificial Sequence: Synthetic polypeptide

SEQ ID NO: 429 - DNA, 1933 bp, Artificial Sequence
  Description of Artificial Sequence: Synthetic polynucleotide
  modified_base (1302)..(1302): a, c, g, or t
caaggcctacgaccagcagctcaaagcgggtgacaatccgtacctgcggtataaccacgccgacgccgagtttcaggagcgtcttcaagaagatacgtcttttgggggcaacctcgggcgagcagtcttccaggccaaaaagcgggttctcgaacctcttggtctggttgagacgccagctaagacggcacctggaaagaagcgaccggtagactcgccagactccacctcgggcatcggcaagaaaggccagcagcccgcgaaaaagagactcaactttgggcagactggcgactcagagtcagtccccgaccctcaaccaatcggagaaccaccagcaggcccctctggtctgggatctggtacaatggctgcaggcggtggcgcaccaatggctgacaataacgagggcgccgacggagtgggtaatgcctcaggaaattggcattgcgattccacatggctgggcgacagagtcatcaccaccagcacccgaacctgggccctgcccacctacaacaaccacctctacaagcaaatctccagtcagtcagcagggagcaccaacgataacgtctatttcggctacagcaccccctgggggtattttgacttcaacagattccattgccacttctcaccacgtgactggcagcgacttatcaacaacaactggggattccggcccaagaagctcaacttcaagctcttcaacatccaggtcaaggaggtcacgacgaatgacggtgtcacaaccatcgctaataaccttaccagcacggttcaggtcttttcggactcggaatatcaactgccgtacgtcctcggctccgcgcaccagggctgcctgcctccgttcccggcagacgtgttcatgattccgcagtacggatacctgactctgaacaatggcagccaatcggtaggccgttcctccttctactgcctggagtactttccttctcagatgctgagaacgggcaacaacttcacctttagctacaccttcgaggacgtgcctttccacagcagctacgcgcacagccagagtctggaccggctgatgaatcccctcatcgaccagtacctgtactacttggccagaacacagagcaacgcaggaggtactgctggcaatcgggaactgcagttttatcagggcggacctaccaccatggccgaacaagcaaagaactggctgcccggaccttgcttccggcaacagagagtatccaagacgctggatcaaaataacaacagcaactttgcctggactggtgccacaaaataccatttaaatgnaagaaattcattggttaatcccggtgtcgccatggcaacccacaaggacgacgaggaacgcttcttcccttcgagcggagttctaatttttggcaaaactggagcagctaataaaactacattagaaaacgtgctcatgacaaatgaagaagaaattcgtcctaccaacccggtagctaccgaggaatacgggattgtaagcagcaacttgcaggcggctagcaccgcagcccagacacaagttgttaacaaccagggagccttacctggcatggtctggcagaaccgggacgtgtacctgcaaggtcccatttgggccaagattcctcacacggacggcaactttcacccgtctcctctaatgggtggctttggactgaaacacccgcctccccagatcctgatcaaaaacacaccggtacctgctaatcctccagaagtgtttactcctgccaagtttgcttccttcatcacgcagtacagcaccgggcaagtcagcgttgagatcgagtgggagctgcagaaagagaacagcaagcgctggaacccagagattcagtacacctccaactttgacaaacagactggagtggactttgctgttgacagccagggtgtttactctgagcct

SEQ ID NO: 430 - protein, 733 aa, Artificial Sequence
  Description of Artificial Sequence: Synthetic polypeptide
MAADGYLPDWLEDNLSEGIREWWDLKPGAPKPKANQQKQDDGRGLVLPGYKYLGPFNGLDKGEPVNAADAAALEHDKAYDQQLKAGDNPYLRYNHADAEFQERLQEDTSFGGNLGRAVFQAKKRVLEPLGLVEEGAKTAPGKKRPLESPQEPDSSSGIGKKGKQPAKKRLNFEEDTGAGDGPPEGSDTSAMSSDIEMRAAPGGNAVDAGQGSDGVGNASGDWHCDSTWSEGKVTTTSTRTWVLPTYNNHLYLRLGTTSNSNTYNGFSTPWGYFDFNRFHCHFSPRDWQRLINNNWGLRPKAMRVKIFNIQVKEVTTSNGETTVANNLTSTVQIFADSSYELPYVMDAGQEGSLSPFPNDVFMVPQYGYCGIVTGENQNQTDRNAFYCLEYFPSQMLRTGNNFEMAYNFGKVPFHSMYAYSQSPDRLMNPLLDQYLWHLQSTTSGETLNQGNAATTFGKIRSGDFAFYRKNWLPGPCVKQQRLSKTASQNYKIPASGGNALLKYDTHYTLNNRWSNIAPGPPMATAGPSDGDFSNAQLIFPGPSVTGNTTTSANNLLFTSEEEIAATNPRDTDMFGQIADNNQNATTAPITGNVTAMGVLPGMVWQNRDIYYQGPIWAKIPHADGHFHPSPLIGGFGLKHPPPQIFIKNTPVPANPATTFTAARVDSFITQYSTGQVAVQIEWEIEKERSKRWNPEVQFTSNYGNQSSMLWAPDTTGKYTEPRVIGSRYLTNHL

SEQ ID NO: 431 - DNA, 3105 bp, Artificial Sequence
  Description of Artificial Sequence: Synthetic polynucleotide
gaattcgcccttgctgcgtcaactggaccaatgagaactttcccttcaacgattgcgtcgacaagatggtgatctggtgggaggagggcaagatgaccgccaaggtcgtggagtccgccaaggccattctgggcggaagcaaggtgcgcgtggaccaaaagtgcaagtcatcggcccagatcgaccccacgcccgtgatcgtcacctccaacaccaacatgtgcgccgtgatcgacgggaacagcaccaccttcgagcaccagcagccgctgcaggaccgcatgttcaagttcgagctcacccgccgtctggagcacgactttggcaaggtgaccaagcaggaagtcaaagagttcttccgctgggctcaggatcacgtgactgaggtggcgcatgagttctacgtcagaaagggcggagccaccaaaagacccgcccccagtgacgcggatataagcgagcccaagcgggcctgcccctcagttgcggagccatcgacgtcagacgcggaagcaccggtggactttgcggacaggtaccaaaacaaatgttctcgtcacgcgggcatgcttcagatgctgtttccctgcaagacatgcgagagaatgaatcagaatttcaacgtctgcttcacgcacggggtcagagactgctcagagtgcttccccggcgcgtcagaatctcaacccgtcgtcagaaaaaagacgtatcagaaactgtgcgcgattcatcatctgctggggcgggcacccgagattgcgtgttcggcccgcgatctcgtcaacgtggacttggatgactgtgtttctgagcaataaatgacttaaaccaggtatggctgctgacggttatcttccagattggctcgaggacaacctctctgagggcattcgcgagtggtgggacctgaaacctggagcccccaagcccaaggccaaccagcagaagcaggacgacggccggggtctggtgcttcctggctacaagtacctcggacccttcaacggactcgacaagggggagcccgtcaacgcggcggacgcagcggccctcgagcacgacaaggcctacgaccagcagctcaaagcgggtgacaatccgtacctgcggtataaccacgccgacgccgagtttcaggagcgtctgcaagaagatacgtcttttgggggcaacctcgggcgagcagtcttccaggccaagaagagggtactcgaacctctgggcctggttgaagaaggtgctaagacggctcctggaaagaagagaccgttagagtcaccacaagagcccgactcctcctcaggaatcggcaaaaaaggcaaacaaccagccaaaaagagactcaactttgaagaggacactggagccggagacggaccccctgaaggatcagataccagcgccatgtcttcagacattgaaatgcgtgcagcaccgggcggaaatgctgtcgatgcgggacaaggttccgatggagtgggtaatgcctcgggtgattggcattgcgattccacctggtctgagggcaaggtcacaacaacctcgaccagaacctgggtcttgcccacctacaacaaccacttgtacctgcggctcggaacaacatcaaacagcaacacctacaacggattctccaccccctggggatactttgactttaacagattccactgtcacttctcaccacgtgactggcaaagactcatcaacaacaactggggactacgaccaaaagccatgcgcgttaaaatcttcaatatccaagttaaggaggtcacaacgtcgaacggcgagactacggtcgctaataaccttaccagcacggttcagatatttgcggactcgtcgtatgagctcccgtacgtgatggacgctggacaagagggaagtctgtctcctttccccaatgacgtcttcatggtgcctcaatatggctactgtggcattgtgactggcgaaaatcagaaccagacggacagaaatgctttctactgcctggagtattttccttcacaaatgctgagaactggcaataactttgaaatggcttacaactttgggaaggtgccgttccactcaatgtatgcttacagccagagcccggacagactgatgaatcccctcctggaccagtacctgtggcacttacagtcgaccacctctggagagactctgaatcaaggcaatgcagcaaccacatttggaaaaatcaggagtggagactttgccttttacagaaagaactggctgcctgggccttgtgttaaacagcagagactctcaaaaactgccagtcaaaattacaagattcctgccagcgggggcaacgctctgttaaagtatgacacccactataccttaaacaaccgctggagcaacatagcgcctggacctccaatggcaacagctggaccttcagatggggacttcagcaacgcccagctcatcttccctggaccatcagtcaccggaaacacaacaacctcagcaaacaatctgttgtttacatcagaagaagaaattgctgccaccaacccaagagacacggacatgtttggtcagattgctgacaataatcagaatgctacaactgctcccataaccggcaacgtgactgctatgggagtgcttcctggcatggtgtggcaaaacagagacatttactaccaagggccaatttgggccaagatcccacacgcggacggacattttcatccttcaccgctaattggcggttttggactgaaacatccgcctccccagatatttatcaaaaacacccccgtacctgccaatcctgcgacaaccttcactgcagccagagtggactctttcatcacacaatacagcaccggccaggtcgctgttcagattgaatgggaaatcgaaaaggaacgctccaaacgctggaatcctgaagtgcagtttacttcaaactatgggaaccagtcttctatgttgtgggctcccgatacaactgggaagtatacagagccgcgggttattggctctcgttatttgactaatcatttgtaactgcctagttaatcaataaaccgtgtgattcgtttcagttgaactttggtctctgcgaagggcgaattc

SEQ ID NO: 432 - protein, 733 aa, Artificial Sequence
  Description of Artificial Sequence: Synthetic polypeptide
MAADGYLPDWLEDNLSEGIREWWDLKPGAPKPKANQQKQDDGRGLVLPGYKYLGPFNGLDKGEPVNAADAAALEHDKAYDQQLKAGDNPYLRYNHADAEFQERLQEDTSFGGNLGRAVFQAKKRVLEPLGLVEEGAKTAPGKKRPLESPQEPDSSSGIGKKGKQPAKKRLNFEEDTGAGDGPPEGSDTSAMSSDIEMRAAPGGNAVDAGQGSDGVGNASGDWHCDSTWSEGKVTTTSTRTWVLPTYNNHLYLRLGTTSNSNTYNGFSTPWGYFDFNRFHCHFSPRDWQRLINNNWGLRPKAMRVKIFNIQVKEVTTSNGETTVANNLTSTVQIFADSSYELPYVMDAGQEGSLPPFPNDVFMVPQYGYCGIVTGENQNQTDRNAFYCLEYFPSQMLRTGNNFEMAYNFEKVPFHSMYAHSQSLDRLMNPLLDQYLWHLQSTTSGETLNQGNAATTFGKIRSGDFAFYRKNWLPGPCVKQQRFSKTASQNYKIPASGGNALLKYDTHYTLNNRWSNIAPGPPMATAGPSDGDFSNAQLIFPGPSVTGNTTTSANNLLFTSEEEIAATNPRDTDMFGQIADNNQNATTAPITGNVTAMGVLPGMVWQNRDIYYQGPIWAKIPHADGHFHPSPLIGGFGLKHPPPQIFIKNTPVPANPATTFTAARVDSFITQYSTGQVAVQIEWEIEKERSKRWNPEVQFTSNYGNQSSMLWAPDTTGKYTEPRVIGSRYLTNHL

SEQ ID NO: 433 - DNA, 3105 bp, Artificial Sequence
  Description of Artificial Sequence: Synthetic polynucleotide
gaattcgcccttgctgcgtcaactggaccaatgagaactttcccttcaacgattgcgtcgacaagatggtgatctggtgggaggagggcaagatgaccgccaaggtcgtggagtccgccaaggccattctgggcggaagcaaggtgcgcgtggaccaaaagtgcaagtcatcggcccagatcgaccccacgcccgtgatcgtcacctccaacaccaacatgtgcgccgtgatcgacgggaacagcaccaccttcgagcaccagcagccgctgcaggaccgcatgttcaagttcgagctcacccgccgtctggagcacgactttggcaaggtgaccaagcaggaagtcaaagagttcttccgctgggctcaggatcacgtgactgaggtggcgcatgagttctacgtcagaaagggcggagccaccaaaagacccgcccccagtgacgcggatataagcgagcccaagcgggcctgcccctcagttgcggagccatcgacgtcagacgcggaagcaccggtggactttgcggacaggtaccaaaacaaatgttctcgtcacgcgggcatgcttcagatgctgtttccctgcaagacatgcgagagaatgaatcagaatttcaacgtctgcttcacgcacggggtcagagactgctcagagtgcttccccggcgcgtcagaatctcaacccgtcgtcagaaaaaagacgtatcagaaactgtgcgcgattcatcatctgctggggcgggcacccgagattgcgtgttcggcctgcgatctcgtcaacgtggacttggatgactgtgtttctgagcaataaatgacttaaaccaggtatggctgctgacggttatcttccagattggctcgaggacaacctctctgagggcattcgcgagtggtgggacctgaaacctggagcccccaagctcaaggccaaccagcagaagcaggacgacggccggggtctggtgcttcctggctacaagtacctcggacccttccacggactcgacaagggggagcccgtcaacgcggcggacgcagcggccctcgagcacgacaaggcctacgaccagcagctcaaagcgggtgacaatccgtacctgcggtataaccacgccgacgccgagtttcaggagcgtctgcaagaagatacgtcttttgggggcaacctcgggcgagcagtcttccaggccaagaagagggtactcgaaccactgggcctggttgaagaaggtgctaagacggctcctggaaagaagagaccgttagagtcaccacaagagcccgactcctcctcaggaatcggcaaaaaaggcaaacaaccagccaaaaagagactcaactttgaagaggacactggagccggagacggaccccctgaaggatcagataccagcgccatgtcttcagacattgaaatgcgtgcagcaccgggcggaaatgctgtcgatgcgggacaaggttccgatggagtgggtaatgcctcgggtgattggcattgcgattccacctggtctgagggcaaggtcacaacaacctcgaccagaacctgggtcttgcccacctacaacaaccacttgtacctgcggctcggaacaacatcaaacagcaacacctacaacggattctccaccccctggggatactttgactttaacagattccactgtcacttctcaccacgtgactggcaaagactcatcaacaacaactggggactacgaccaaaagccatgcgcgttaaaatcttcaatatccaagttaaggaggtcacaacgtcgaacggcgagactacggtcgctaataaccttaccagcacggttcagatatttgcggactcgtcgtatgagctcccgtacgtgatggacgctggacaagagggaagtctgcctcctttccccaatgacgtcttcatggtgcctcaatatggctactgtggcattgtgactggcgaaaatcagaaccagacggacagaaatgctttctactgcctggagtattttccttcacaaatgctgagaactggcaataactttgaaatggcttacaactttgagaaggtgccgttccactcaatgtatgctcacagccagagcctggacagactgatgaatcccctcctggaccagtacctgtggcacttacagtcgaccacctctggagagactctgaatcaaggcaatgcagcaaccacatttggaaaaatcaggagtggagactttgccttttacagaaagaactggctgcctgggccttgtgttaaacagcagagattctcaaaaactgccagtcaaaattacaagattcctgccagcgggggcaacgctctgttaaagtatgacacccactataccttaaacaaccgctggagcaacatagcgcctggacctccaatggcaacagctggaccttcagatggggacttcagcaacgcccagctcatcttccctggaccatcagtcaccggaaacacaacaacctcagcaaacaatctgttgtttacatcagaaggagaaattgctgccaccaacccaagagacacggacatgtttggtcagattgctgacaataatcagaatgctacaactgctcccataaccggcaacgtgactgctatgggagtgcttcctggcatggtgtggcaaaacagagacatttactaccaagggccaatttgggccaagatcccacacgcggacggacattttcatccttcaccgctaattggcggttttggactgaaacatccgcctccccagatatttatcaaaaacacccccgtacctgccaatcctgcgacaaccttcactgcagccagagtggactctttcatcacacaatacagcaccggccaggtcgctgttcagattgaatgggaaatcgaaaaggaacgctccaaacgccggaatcctgaagtgcagtttacttcaaactatgggaaccagtcttctatgttgtgggctcccgatacaactgggaagtatacagagccgcgggttattggctctcgttatttgactaatcatttgtaactgcctagttaatcaataaaccgtgtgattcgtttcagttgaactttggtctctgcgaagggcgaattc

SEQ ID NO: 434 - protein, 733 aa, Artificial Sequence
  Description of Artificial Sequence: Synthetic polypeptide
MAADGYLPDWLEDNLSEGIREWWDLKPGAPKPKANQQKQDDGRGLVLPGYEYLGPFNGLDKGEPVNAADAAALEHDKAYDQQLKAGDNPYLRYNHADAEFQERLQEDTSFGGNLGRAVFQAKKRVLEPLGLVEEGAKTAPGKKRPLESPQEPDSSSGIGKKGKQPAKKRLNFEEDTGAGDGPPEGSDTSAMSSDIEMRAAPGGNAVDAGQGSDGVGNASGDWHCDSTWSEGKVTTTSTRTWVLPTYNNHLYLRLGTTSNSNTYNGFSTPWGYFDFNRFHCHFSPRDWQRLINNNWGLRPKAMRVKIFNIQVKEVTTSNGETTVANNLTSTVQIFADSSYELPYVMDAGQEGSLPPFPNDVFMVPQYGYCGIVTGENQNQTDRNAFYCLEYFPSQMLRTGNNFETAYNFEKVPFHSMYAHSQSLDGLMNPLLDQYLWHLQSTTSGETLNQGNAATTFGKIRSGDFAFYRKNWLPGPCVKQQRFSKTASQNYKIPASGGNALLKYDTHYTLNNRWSNIAPGPPMATAGPSDGDFSNAQLIFPGPSVTGNTTTSANNLLFTSEEEIAATNPRDTDMFGQIADNNQNATTAPITGNVTAMGVLPGMVWQNRDIYYQGPIWAKIPHADGHFHPSPLIGGFGLKHPPPQIFIKNTPVPAYPATTFTAARVDSFITQYSTGQVAVQIEWEIEKERSKRWNPEVQFTSNCGNQSSMLWAPDTTGKYTEPRVIGSRYLTNHL

SEQ ID NO: 435 - DNA, 3105 bp, Artificial Sequence
  Description of Artificial Sequence: Synthetic polynucleotide
gaattcgcccttcgcagagaccaaagttcaactgaaacgaatcacacggtttattgattaactaggcagttacaaatgattagtcaaataacgagagccaataacccgcggctctgtatacttcccagttgtatcgggagcccacaacatagaagactggttcccacagtttgaagtaaactgcacttcaggattccagcgtttggagcgttccttttcgatttcccattcaatctgaacagcgacctggccggtgctgtattgtgtgatgaaagagtccactctggctgcagtgaaggttgtcgcaggataggcaggtacgggggtgtttttgataaatatctggggaggcggatgtttcagtccaaaaccgccaattagcggtgaaggatgaaaatgtccgtccgcgtgtgggatcttggcccaaattggcccttggtagtaaatgtctctgttttgccacaccatgccaggaagcactcccatagcagtcacgttgccggttatgggagcagttgtagcattctgattattgtcagcaatctgaccaaacatgtccgtgtctcttgggttggtggcagcaatttcttcttctgatgtaaacaacagattgtttgctgaggttgttgtgtttccggtgactgatggtccagggaagatgagctgggcgttgctgaagtccccatctgaaggtccagctgttgccattggaggtccaggcgctatgttgctccagcggttgtttaaggtatagtgggtgtcatactttaacagagcgttgcccccgctggcaggaatcttgtaattttgactggcagtttttgagaatctctgctgtttaacacaaggcccaggcagccagttctttctgtaaaaggcaaagtctccactcctgatttttccaaatgtggttgctgcattgccttgattcagagtctctccagaggtggtcgactgtaagtgccacaggtactggtccaggaggggattcatcagtccgtccaggctctggctgtgagcatacattgagtggaacggcaccttctcaaagttgtaagccgtttcaaagttattgccagttctcagcatttgtgaaggaaaatactccaggcagtagaaagcatttctgtccgtctggttctgattttcgccagtcacaatgccacagtagccatattgaggcaccatgaagacgtcattggggaaaggaggcagacttccctcttgtccagcgtccatcacgtacgggagctcatacgacgagtccgcaaatatctgaaccgtgctggtaaggttattagcgaccgtagtctcgccgttcgacgttgtgacctccttaacttggatattgaagattttaacgcgcatggcttttggtcgtagtccccagttgttgttgatgagtctttgccagtcacgtggtgagaagtgacagtggaatctgttaaagtcaaagtatccccagggggtggagaatccgttgtaggtgttgctgtttgatgttgttccgagccgcaggtacaagtggttgttgtaggtgggcaagacccaggttctggtcgaggttgttgtgaccttgccctcagaccaggtggaatcgcaatgccaatcacccgaggcattacccactccatcggaaccttgtcccgcatcgacagcatttccgcccggtgctgcacgcatttcaatgtctgaagacatggcgctggtatctgatccttcagggggtccgtctccggctccagtgtcctcttcaaagttgagtctctttttggctggttgtttgccttttttgccgattcctgaggaggagtcgggctcttgtggtgactctaacggtctcttctttccaggagccgtcttagcaccttcttcaaccaggcccagaggttcgagtaccctcttcttggcctggaagactgctcgcccgaggttgcccccaaaagacgtatcttcttgcagacgctcctgaaactcggcgtcggcgtggttataccgcaggtacggattgtcacccgctttgagctgctggtcgtaggccttgtcgtgctcgagggccgctgcgtccgccgcgttgacgggctcccccttgtcgagtccgttgaagggtccgaggtactcgtagccaggaagcaccagaccccggccgtcgtcctgcttctgctggttggccttgggcttgggggctccaggtttcaggtcccaccactcgcgaatgccctcagagaggttgtcctcgagccaatctggaagataaccgtcagcagccatacctggtttaagtcatttattgctcagaaacacagtcatccaagtccacgttgacgagatcgcaggccgaacacgcaatctcgggtgcccgccccagcagatgatgaatcgcgcacagtttctgatacgtcttttttctgacgacgggttgagattctgacgcgccggggaagcactctgagcagtctctgaccccgtgcgtgaagcagacgttgaaattctgattcattctctcgcatgtcttgcagggaaacagcatctgaagcatgcccgcgtgacgagaacatttgttttggtacctgtccgcaaggtccaccggtgcttccgcgtctgacgtcgatggctccgcaactgaggggcaggcccgcttgggctcgcttatatccgcgtcactgggggcgggtcttttggtggctccgccctttctgacgtagaactcatgcgccacctcagtcacgtgatcctgagcccagcggaagaactctttgacttcctgcttggtcaccttgccaaagtcgtgctccagacggcgggtgagctcgaacttgaacatgcggtcctgcagcggctgctggtgctcgaaggtggtgctgttcccgtcgatcacggcgcacatgttggtgttggaggtgacgatcacgggcgtggggtcgatctgggccgatgacttgcacttttggtccacgcgcaccttgcttccgcccagaatggccttggcggactccacgaccttggcggtcatcttgccctcctcccaccagatcaccatcttgtcgacgcaatcgttgaagggaaagttctcattggtccagttgacgcagcaagggcgaattc

SEQ ID NO: 436 - protein, 729 aa, Artificial Sequence
  Description of Artificial Sequence: Synthetic polypeptide
MAADGYLPDWLEDNLSEGIREWWDLKPGAPKPKANQQKQDDGRGLVLPGYKYLGPFNGLDKGEPVNAADAAALEHDKAYDQQLKAGDNPYLRYNHADAEFQERLQEDTSFGGNLGRAVFQAKKRVLEPLGLVEEGAKTAPGKKRPIDSPDSSTGIGKKGQQPAKKKLNFGQTGDSESVPDPQPLGEPPAAPSSVGSGTMAAGGGAPMADNNEGADGVGNASGNWHCDSTWLGDRVITTSTRTWALPTYNNHLYKQISSSSSGATNDNHYFGYSTPWGYFDFNRFHCHFSPRDWQRLINNNWGFRPKKLRFKLFNIQVKEVTTNDGVTTIANNLTSTVQVFSDSEYQLPYVLGSAHQGCLPPFPADVFMIPQYGYLTLNNGSQSVGRSSFYCLEYFPSQMLRTGNNFEFSYSFEDVPFHSSYAHSQSLDRLMNPLIDQYLYYLARTQSTTGSTRELQFHQAGPNTMAEQSKNWLPGPCYRQQGLSKNLDFNNNSNFAWTAATKYHLNGRNSLTNPGIPMATNKDDEDQFFPINGVLVFGKTGAANKTTLENVLMTSEEEIKTTNPVATEEYGVVSSNLQPSTAGPQSQTINSQGALPGMVWQNRDVYLQGPIWAKIPHTDGNFHPSPLMGGFGLKHPPPQILIKNTPVPANPPEVFTPAKFASFITQYSTGQVSVEIEWELQKENSKRWNPEIQYTSNYAKSNNVEFAVNPDGVYTEPRPIGTRYLPRNL

SEQ ID NO: 437 - DNA, 3094 bp, Artificial Sequence
  Description of Artificial Sequence: Synthetic polynucleotide
gaattcgcccttgctgcgtcaactggaccaagagaactttcccttcaacgattgcgtcgacaagatggtgatctggtgggaggagggcaagatgacggccaaggtcgtggagtccgccaaagccattctgggcggaagcaaggtgcgcgtcgaccaaaagtgcaagtcctcggcccagatcgatcccacccccgtgatcgtcacctccaacaccaacatgtgcgccgtgatcgacgggaacagcaccaccttcgagcaccagcagccgttgcaggaccggatgttcaaatttgaactcacccgccgtctggaacacgactttggcaaggtgaccaagcaggaagtcaaagagttcttccgctgggctagtgatcacgtgactgaggtgacgcatgagttctacgtcagaaagggcggagccagcaaaagacccgcccccgatgacgcggatataagcgagcccaagcgggcctgtccctcagtcacggacccatcgacgtcagacgcggaaggagctccggtggactttgccgacaggtaccaaaacaaatgttctcgtcacgcgggcatgcttcagatgctgtttccctgcaaaacgtgcgagagaatgaatcagaatttcaacatttgcttcacgcacggggtcagagactgtttagaatgtttccccggcgtgtcagaatctcaaccggtcgtcagaaaaaagacgtatcggaagctgtgtgcgattcatcatctgctggggcgggcacccgagattgcttgctcggcctgcgacctggtcaacgtggacctggacgactgtgtttctgagcaataaatgacttaaaccgggtatggctgccgatggttatcttccagattggctcgaggacaacctctctgagggcattcgcgagtggtgggacctgaaacctggagccccgaaacccaaagccaaccagcaaaagcaggacgacggccggggtctggtgcttcctggctacaagtacctcggacccttcaacggactcgacaagggggagcccgtcaacgcggcggacgcagcggccctcgagcacgacaaggcctacgaccagcagctcaaagcgggtgacaatccgtacctgcggtataaccacgccgacgccgagtttcaggagcgtctgcaagaagatacgtcatttgggggcaacctcgggcgagcagtcttccaggccaagaagcgggttctcgaacctctcggtctggttgaggaaggcgctaagacggctcctggaaagaagagacccatagactctccagactcctccacgggcatcggcaaaaaaggccagcagcccgctaaaaagaagctcaattttggtcagactggcgactcagagtcagtccccgaccctcaacctcttggagaacctccagcagcgccctctagtgtgggatctggtacaatggctgcaggcggtggcgcaccaatggcagacaataacgaaggtgccgacggagtgggtaatgcctcaggaaattggcattgcgattccacatggctgggcgacagagtcatcaccaccagcaccagaacctgggccctccccacctacaacaaccacctctacaagcaaatctccagcagcagctcaggagccaccaatgacaaccactacttcggctacagcaccccctgggggtattttgactttaacagattccactgccacttctcaccacgtgactggcagcgactcatcaacaacaactggggattccggcccaagaagctgcggttcaagctcttcaacatccaggtcaaggaggtcacaacgaatgacggcgtcacgaccatcgctaataaccttaccagcacggttcaggtcttctcggactcggaataccagctgccgtacgtcctcggctctgcgcaccagggctgcctgcctccgttcccggcggacgtcttcatgattcctcagtacggctacctgactctgaacaacggcagccaatcggtgggccgttcctccttctactgcctggaatatttcccctctcaaatgctgagaacgggcaacaactttgagttcagttacagcttcgaggacgtgcctttccacagcagctacgcgcacagccagagcctagaccggctgatgaaccctctcatcgaccagtacctgtactacctggcccggacccagagcaccacgggttccaccagggaactgcaatttcatcaagctgggcccaatactatggccgagcagtcaaagaactggctgcctggaccctgctataggcaacagggactgtcaaagaacttggactttaacaacaacagcaattttgcctggactgctgccactaaatatcatctgaatggcagaaactctttgaccaatcctggcattcccatggcaaccaacaaggatgatgaggaccagttctttcccatcaacggggtactggtttttggcaagacgggagctgccaacaaaactacgctggaaaacgttctgatgaccagcgaggaggagatcaagaccactaaccctgtggctacagaagaatacggtgtggtctccagcaacctgcagccgtctacagccgggcctcaatcacagactatcaacagccagggagcactgcctggcatggtctggcagaaccgggacgtgtatctgcagggtcccatctgggccaaaattcctcacacggatggcaactttcacccgtctcctctgatgggcggttttggactcaaacacccgcctccacagatcctgatcaaaaacacacctgtacctgctaatcctccggaggtgtttactcctgccaagtttgcctccttcatcacgcagtacagcaccggacaagtcagcgtggaaatcgagtgggagctgcagaaagaaaacagcaagcgctggaacccagaaattcagtatacttccaattatgccaagtctaataatgttgaatttgctgtgaaccctgatggtgtttatactgagcctcgccccattggcactcgttacctcccccgtaatctgtaattgcttgttaatcaataaaccggttgattcgtttcagttgaactttggtctctgcgaagggcgaattc

SEQ ID NO: 438 - protein, 1458 aa, Artificial Sequence
  Description of Artificial Sequence: Synthetic polypeptide
MAADGYLPDWLEDNLSEGIREWWDLKPGAPKPKANQQKQDDGRGLVLPGYKYLGPFNGLDKGEPVNAADAAALEHDKAYDQQLKAGDNPYLRYNHADAEFQERLQEDTSFGGNLGRAVFQAKKRVLEPLGLVEEGAKTAPGKKRPIDSPDSSTGIGKKGQQPAKKKLNFGQTGDSESVPDPQPLGEPPAAPSSVGSGTMAAGGGAPTADNNEGADGVGNASGNWHCDSTWLGDRVITTSTRTWALPTYNNHLYKQISSSSSGATNDNHYFGYSTPWGYFDFNRFHCHFSPRDWQRLINNNWGFRPKKLRFKLFNIQVKEVTTNDGVTTIANNLTSTVQVFSDSEYQLPYVLGSAHQGCLPPFPADVFMIPQYGYLTLNNGSQSVGRSSFYCLEYFPSQMLRTGNNFEFSYSFEDVPFHSSYAHSQSLDRLMNPLIDQYLYYLARTQSTTGSTRELQFHQAGPNTMAEQSKNWLPGPCYRQQRLSKNLDFNNNSNFAWTAATKYHLNGRNSLTNPGIPMATNKDDEDQFFPINGVLVFGKTGAANKTTLENVLMTSEEEIKTTNPVATEEYGVVSSNLQSSTAGPQSQTINSQGALPGMVWQNRDVYLQGPIWAKIPHTDGNFHPSPLMGGFGLEHPPPQILIKNTPVPANPPEVFTPAKFASFITQYSTGQVSVEIEWELQKENSKRWNPEIQYTSNYAKSNNVEFAVNPDGVYTEPRPIGTRYLTRNLMAADGYLPDWLEDNLSEGIREWWDLKPGAPKPKANQQKQDDGRGLVLPGYKYLGPFNGLDKGEPVNAADAAALEHDKAYDQQLKAGDNPYLRYNHADAEFQERLQEDTSFGGNLGRAVFQAKKRVLEPLGLVEEGAKTAPGKKRPIGSPDSSTGIGKKGQQPAKKKLNFGQTGDSESVPDPQPLGEPPAAPSSVGSGTMAAGGGAPMADNNEGADGVGNASGNWHCDSTWLGDRVITTSTRTWALPTYNNHLYKQISSSSSGATNDNHYFGYSTPWGYFDFNRFHCHFSPRDWQRLINNNWGFRPKKLRFKLLNIQVKEVTTNDGVTTIANNLTSTVQVFSDSEYQLPYVLGSAHQGCLPPFPADVFMIPQYGYLTLDNGSQSVGRSSFYCLEYFPSQMLRTGNNFEFSYSFEDVPFHSSYAHSQSLDRLMNPLIDQYLYYLARTQSTTGSTRELQFHQAGPNTMAEQSKNWLPGPCYRQQRLSKNLDFNNNSNFAWTAATKYHLNGRNSLTNPGIPMATNKDDEDQFFPINGVLVFGKTGAANKTTLENVLMTSEEEIKTTNPVATEEYGVVSSNLQSSTAGPQSQTINSQGALPGMVWQNRDVYLQGPIWAKIPHTDGNFHPSPLMGGFGLKHPPPQILIKNTPVPANPPEVFTPAKFASFITQYSTGQVSVEIEWELQKENSKRWNPEIQYTSNYAKSNNVEFAVNPDGVYTEPRPIGTRYLTRNL

SEQ ID NO: 439 - DNA, 3095 bp, Artificial Sequence
  Description of Artificial Sequence: Synthetic polynucleotide
gaattcgcccttcgcagagaccaaagttcaactgaaacgaatcaaccggtttattgattaacaagcaattacagattacgggtgaggtaacgagtgccaatggggcgaggctcagtataaacaccatcagggttcacagcaaattcaacattattagacttggcataattggaagtatactgaatttctgggttccagcgcttgctgttttctttctgcagctcccactcgatttccacgctgacttgtccggtgctgtactgcgtgatgaaggaggcaaacttggcaggagtaaacacctccggaggattagcaggtacaggtgtgtttttgatcaggatctgtggaggcgggtgtttgagtccaaaaccgcccatcagaggagacgggtgaaagttgccatccgtgtgaggaattttggcccagatgggaccctgcagatacacgtcccggttctgccagaccatgccaggcagtgctccctggctgttgatagtctgtgattgaggcccggctgtagacgactgcaggttgctggagaccacaccgtattcttctgtagccacagggttagtggtcttgatctcctcctcgctggtcatcagaacgttttccagcgtagttttgttggcagctcccgtcttgccaaaaaccagtaccccgttgatgggaaagaactggtcctcatcatccttgttggttgccatgggaatgccaggattggtcaaagagtttctgccattcagatgatatttagtggcagcagtccaggcaaaattgctgttgttgttaaagtccaagttctttgacagtctctgttgcctatagcagggtccaggcagccagttctttgactgctcggccatagtattgggcccagcttgatgaaattgcagttccctggtggaacccgtggtgctctgggtccgggccaggtagtacaggtactggtcgatgagagggttcatcagccggtctaggctctggctgtgcgcgtagctgctgtggaaaggcacgtcctcgaagctgtaactgaactcaaagttgttgcccgttctcagcatttgagaggggaaatattccaggcagtagaaggaggaacggcccaccgattggctgccgttgtccagagtcaggtagccgtactgaggaatcatgaagacgtccgccgggaacggaggcaggcagccctggtgcgcagagccgaggacgtacggcagctggtattccgagtccgagaagacctgaaccgtgctggtaaggttattagcgatggtcgtgacgccgtcattcgttgtgacctccttgacctggatgttgaggagcttgaaccgcagcttcttgggccggaatccccagttgttgttgatgagtcgctgccagtcacgtggtgagaagtggcagtggaatctgttaaagtcaaaatacccccagggggtgctgtagccgaagtagtggttgtcattggtggctcctgagctgctgctggagatttgcttgtagaggtggttgttgtaggtggggagggcccaggttctggtgctggtggtgatgactctgtcgcccagccatgtggaatcgcaatgccaatttcctgaggcattacccactccgtcggcaccttcgttattgtctgccattggtgcgccaccgcctgcagccattgtaccagatcccacactagagggcgctgctggaggttctccaagaggttgagggtcggggactgactctgagtcgccagtctgaccaaaattgagcttctttttagcgggctgctggccttttttgccgatgcccgtggaggagtctggagagcctatgggtctcttctttccaggagccgtcttagcgccttcctcaaccagaccgagaggttcgagaacccgcttcttggcctggaagactgctcgcccgaggttgcccccaaatgacgtatcttcttgcagacgctcctgaaactcggcgtcggcgtggttataccgcaggtacggattgtcacccgctttgagctgctggtcgtaggccttgtcgtgctcgagggccgctgcgtccgccgcgttgacgggctcccccttgtcgagtccgttgaagggtccgaggtacttgtagccaggaagcaccagaccccggccgtcgtcctgcttttgctggttggctttgggtttcggggctccaggtttcaggtcccaccactcgcgaatgccctcagagaggttgtcctcgagccaatctggaagataaccatcggcagccatacctggtttaagtcatttattgctcagaaacacagtcgtccaggtccacgttgaccaggtcgcaggccgagcaagcaatctcgggtgcccgccccagcagatgatgaatcgcacacagcttccgatacgtcttttttctgacgaccggttgagattctgacacgccggggaaacattctaaacagtctctgaccccgtgcgtgaagcaaatgttgaaattctgattcattctctcgcacgttttgcagggaaacagcacctgaagcatgcccgcgtgacgagaacatttgttttggtacctgtcggcaaagtccaccggagctccttccgcgtctgacgtcgatgggtccgtgactgagggacgggcccgcttgggctcgcttatatccgcgtcatcgggggcgggtcttttgctggctccgccctttctgacgtagaactcatgcgtcacctcagtcacgtgatcactagcccagcggaagaactctttgacttcctgctttgtcaccttgccaaagtcgtgttccagacggcgggtgagttcaaatttgaacatccggtcctgcaacggttgctggtgctcgaaggtggtgctgttcccgtcgatcacggcgcacatgttggtgttggaggtgacgatcacgggggtgggatcgatctgggcggacgacttgcacttttggtccacgcgcaccttgctgccgccgagaatggccttggcggactccacgaccttggccgtcatcttgccctcctcccaccagatcaccatcttgtcgacgcaatcgttgaagggaaagttctcattggtccagttgacgcagcaagggcgaattc

SEQ ID NO: 440 - DNA, 3095 bp, Artificial Sequence
  Description of Artificial Sequence: Synthetic polynucleotide
gaattcgcccttcgcagagaccaaagttcaactgaaacgaatcaaccggtttattgattaacaagcaattacagattacgggtgaggtaacgagtgccaatggggcgaggctcagtataaacaccatcagggttcacagcaaattcaacattattagacttggcataattggaagtatactgaatttctgggttccagcgcttgctgttttctttctgcagctcccactcgatttccacgctgacttgtccggtgctgtactgcgtgatgaaggaggcaaacttggcaggagtaaacacctccggaggattagcaggtacaggtgtgtttttgatcaggatctgtggaggcgggtgttcgagtccaaaaccgcccatcagaggagacgggtgaaagttgccatccgtgtgaggaattttggcccagatgggaccctgcagatacacgtcccggttctgccagaccatgccaggcagtgctccctggctgttgatagtctgtgattgaggcccggctgtagacgactgcaggttgctggagaccacaccgtattcttctgtagccacagggttagtggtcttgatctcctcctcgctggtcatcagaacgttttccagcgtagttttgttggcagctcccgtcttgccaaaaaccagtaccccgttgatgggaaagaactggtcctcatcatccttgttggttgccatgggaatgccaggattggtcaaagagtttctgccattcagatgatatttagtggcagcagtccaggcaaaattgctgttgttgttaaagtccaagttctttgacagtctctgttgcctatagcagggtccaggcagccagttctttgactgctcggccatagtattgggcccagcttgatgaaattgcagttccctggtggaacccgtggtgctctgggtccgggccaggtagtacaggtactggtcgatgagagggttcatcagccggtctaggctctggctgtgcgcgtagctgctgtggaaaggcacgtcctcgaagctgtaactgaactcaaagttgttgcccgttctcagcatttgagaggggaaatattccaggcagtagaaggaggaacggcccaccgattggctgccgttgttcagagtcaggtagccgtactgaggaatcatgaagacgtccgccgggaacggaggcaggcagccctggtgcgcagagccgaggacgtacggcagctggtattccgagtccgagaagacctgaaccgtgctggtaaggttattagcgatggtcgtgacgccgtcattcgttgtgacctccttgacctggatgttgaagagcttgaaccgcagcttcttgggccggaatccccagttgttgttgatgagtcgctgccagtcacgtggtgagaagtggcagtggaatctgttaaagtcaaaatacccccagggggtgctgtagccgaagtagtggttgtcattggtggctcctgagctgctgctggagatttgcttgtagaggtggttgttgtaggtggggagggcccaggttctggtgctggtggtgatgactctgtcgcccagccatgtggaatcgcaatgccaatttcctgaggcattacccactccgtcggcaccttcgttattgtctgccgttggtgcgccaccgcctgcagccattgtaccagatcccacactagagggcgctgctggaggttctccaagaggttgagggtcggggactgactctgagtcgccagtctgaccaaaattgagcttctttttagcgggctgctggccttttttgccgatgcccgtggaggagtctggagagtctatgggtctcttctttccaggagccgtcttagcgccttcctcaaccagaccgagaggttcgagaacccgcttcttggcctggaagactgctcgcccgaggttgcccccaaatgacgtatcttcttgcaggcgctcctgaaactcggcgtcggcgtggttataccgcaggtacggattgtcacccgctttgagctgctggtcgtaggccttgtcgtgctcgagggccgctgcgtccgccgcgttgacgggctcccccttgtcgagtccgttgaagggtccgaggtacttgtagccaggaagcaccagaccccggccgtcgtcctgcttttgctggttggctttgggtttcggggctccaggtttcaggtcccaccactcgcgaatgccctcagagaggttgtcctcgagccaatctggaagataaccatcggcagccatacctggtttaagccatttattgctcagaaacacagtcgtccaggtccacgttgaccaggtcgcaggccgagcaggcaatctcgggtgcccgccccagcagatgatgaatcgcacacagcttccgatacgtcttttttctgacgaccggttgagattctgacacgccggggaaacattctaaacagtctctgaccccgtgcgtgaagcaaatgttgaaattctgattcattctctcgcacgttttgcagggaaacagcatctgaagcatgcccgcgtggcgagaacatttgttttggtacctgtcggcaaagtccaccggagctccttccgcgtctgacgtcgatgggtccgtgactgagggacaggcccgcttgggctcgcttatatccgcgtcatcgggggcgggtcttttgctggctccgccctttctgacgtagaactcatgcgtcacctcagtcacgtgatcactagcccagcggaagaactctttgacttcctgctttgtcaccttgccaaagtcgtgttccagacggcgggtgagttcaaatttgaacatccggtcctgcaacggctgctggtgctcgaaggtggtgctgttcccgtcgatcacggcgcgcatgttggtgttggaggtgacgatcacgggggtgggatcgatctgggcggacgacttgcacttttggtccacgcgcaccttgctgccgccgagaatggccttggcggactccacgaccttggccgtcatcttgccctcctcccaccagatcaccatcttgtcgacgcaatcgttgaagggaaagttctcattggtccagttgacgcagcaagggcgaattc

SEQ ID NO: 441 - protein, 729 aa, Artificial Sequence; identical to SEQ ID NO: 169
  Description of Artificial Sequence: Synthetic polypeptide

SEQ ID NO: 442 - protein, 729 aa, Artificial Sequence
  Description of Artificial Sequence: Synthetic polypeptide
MAADGYLPDWLEDNLSEGIREWWDLKPGAPKPKANQQKQDDGRGLVLPGYKYLGPFNGLDKGEPVNAADAAALEHDKAYDQQLKAGDNPYLRYNHADAEFQERLQEDTSFGGNLGRAVFQAKKRVLEPLGLVEEGAKTAPGKKRPIDSPDSSTGIGKKGQQPAKKKLNFGQTGDSESVPDPQPLGEPPAAPSSVGSGTMAAGGGAPTADNNEGADGVGNASGNWHCDSTWLGDRVITTSTRTWALPTYNNHLYKQISSSSSGATNDNHYFGYSTPWGYFDFNRFHCHFSPRDWQRLINNNWGFRPKKLRFKLFNIQVKEVTTNDGVTTIANNLTSTVQVFSDSEYQLPYVLGSAHQGCLPPFPADVFMIPQYGYLTLNNGSQSVGRSSFYCLEYFPSQMLRTGNNFEFSYSFEDVPFHSSYAHSQSLDRLMNPLIDQYLYYLARTQSTTGSTRELQFHQAGPNTMAEQSKNWLPGPCYRQQRLSKNLDFNNNSNFAWTAATKYHLNGRNSLTNPGIPMATNKDDEDQFFPINGVLVFGKTGAANKTTLENVLMTSEEEIKTTNPVATEEYGVVSSNLQSSTAGPQSQTINSQGALPGMVWQNRDVYLQGPIWAKIPHTDGNFHPSPLMGGFGLKHPPPQILIKNTPVPANPPEVFTPAKFASFITQYSTGQVSVEIEWELQKENSKRWNPEIQYTSNYAKSNNVEFAVNPDGVYTEPRPIGTRYLTRNL

SEQ ID NO: 443 - protein, 729 aa, Artificial Sequence
  Description of Artificial Sequence: Synthetic polypeptide
MAADGYLPDWLEDNLSEGIREWWDLKPGAPKPKANQQKQDDGRGLVLPGYKYLGPFNGLDKGEPVNAADAAALEHDKAYDQQLKAGDNPYLRYNHADAEFQERLQEDTSFGGNLGRAVFQAKKRVLEPLGLVEEGAKTAPGKKRPIDSPDSSTGIGKKGQQPAKKKLNFGQTGDSESVPDPQPLGEPPAAPSSVGSGTMAAGGGAPMADNNEGADGVGNASGNWHCDSTWLGDRVITTSTRTWALPTYNNHLYKQISSSSSGATNDNHYFGYSTPWGYFDFNRFHCHFSPRDWQRLINNNWGFRPKKLRFKLFNIQVKEVTTNDGVTTIANNLTSTVQVFSDSEYQLPYVLGSAHQGCLPPFPADVFMIPQYGYLTLNNGSQSVGRSSFYCLEYFPSQMLRTGNNFEFSYSFEDVPFHSSYAHSQSLDRLMNPLIDQYLYYLARTQSTTGSTRELQFHQAGPNTMAEQSKNWLPGPCYRQQRLSKNLDFNNNSNFAWTAATKYHLNGRNSLTNPGIPMATNKDDEDQFFPINGVLVFGKTGAANKTTLENVLMTSEEEIKTTNPVATEEYGVVSSNLQSSTAGPQSQTINSQGALPGMVWQNRDVYLQGPIWAKIPHTDGNFHPSPLMGGFGLKHPPPQILIKNTPVPANPPEVFTPAKFASFITQYSTGQVSVEIEWELQKENSKRWNPEIQYTSNYAKSNNVEFAVNPDGVYTEPRPIGTRYLTRNL

SEQ ID NO: 444 - DNA, 2217 bp, Artificial Sequence
  Description of Artificial Sequence: Synthetic polynucleotide
atggctgctgacggttatcttccagattggctcgaggacaacctctctgagggcattcgcgagtggtgggacctgaaacctggagcccccaagcccaaggccaaccagcagaagcaggacgacggccggggtctggtgcttcctggctacaagtacctcggacccttcaacggactcgacaagggggagcccgtcaacgcggcggacgcagcggccctcgagcacgacaaggcctacgaccagcagctcaaagcgggtgacaatccgtacctgcggtataaccacgccgacgccgagtttcaggagcgtctacaagaagatacgtcttttgggggcaacctcgggcgagcagtcttccaggccaagaagcgggttctcgaacctctcggtctggttgaggaagctgctaagacggctcctggaaagaagagaccggtagaaccgtcacctcagcgttcccccgactcctccacgggcatcggcaagaaaggccagcggcccgctaaaaagagactgaactttggtcagactggcgactcagagtcagtccccgaccctcaaccaatcggagaaccaccagcaggcccctctggtctgggatctggtacaatggctgcaggcggtggcgctccaatggcagacaataacgaaggcgccgacggagtgggtagttcctcaggaaattggcattgcgattccacatggctgggcgacagagtcatcaccaccagcacccgaacctgggccctgcccacctacaacaaccacctctacaagcaaatatccaatgggacatcgggaggaagcaccaacgacaacacctacttcggctacagcaccccctgggggtattttgacttcaacagattccactgccacttctcaccacgtgactggcagcgactcatcaacaacaactggggattccggccaaaaagactcagcttcaagcccttcaacatccaggtcaaggaggtcacgcagaatgaaggcaccaagaccatcgccaataaccttaccagcacgattcaggtatttacggactcggaataccagctgccgtacgtcctcggctccgcgcaccagggctgcctgcctccgttcccggcggacgtcttcatgattccccagtacggctaccttacactgaacaatggaagtcaagccgtaggccgttcctccttctactgcctggaatattttccatctcaaatgctgcgaactggaaacaattttgaattcagctacaccttcgaggacgtgcctttccacagcagctacgcacacagccagagcttggaccgactgatgaatcctctcatcgaccagtacctgcactacttatccagaactcagtccacaggaggaactcaaggtacccagcaattgttattttctcaagctgggcctgcaaacatgtcggctcaggctaagaactggctacctggaccttgctaccggcagcagcgagtctctacgacactgtcgcaaaacaacaacagcaactttgcttggactggtgccaccaaatatcacctgaacggaagagactctttggtaaatcccggtgtcgccatggcaacccacaaggacgacgaggaacgcttcttcccgtcgagtggagtcctgatgtttggaaaacagggtgctggaagagacaatgtggactacagcagcgttatgctaaccagcgaagaagaaattaaaaccactaaccctgtagccacagaacaatacggtgtggtggctgacaacttgcagcaaaccaatacagggcctattgtgggaaatgtcaacagccaaggagccttacctggcatggtctggcagaaccgagacgtgtacctgcagggtcccatctgggccaagattcctcacacggacggcaacttccacccttcaccgctaatgggaggatttggactgaagcacccacctcctcagatcctgatcaagaacacgccggtacctgcggatcctccaacaacgttcagccaggcgaaattggcttccttcattacgcagtacagcaccggacaggtcagcgtggaaatcgagtgggagctgcagaaggagaacagcaaacgctggaacccagagattcagtacacttcaaactactacaaatctacaaatgtggactttgctgtcaatacagagggaacttattctgagcctcgccccattggtactcgctacctcacccgtaatctgtaa

SEQ ID NO: 445 - protein, 738 aa, Artificial Sequence
  Description of Artificial Sequence: Synthetic polypeptide
MAADGYLPDWLEDNLSEGIREWWDLKPGAPKPKANQQKQDDGRGLVLPGYKYLGPFNGLDKGEPVNAADAAALEHDKAYDQQLKAGDNPYLRYNHADAEFQERLQEDTSFGGNLGRAVFQAKKRVLEPLGLVEEAAKTAPGKKRPVEPSPQRSPDSSTGIGKKGQRPAKKRLNFGQTGDSESVPDPQPIGEPPAGPSGLGSGTMAAGGGAPMADNNEGADGVGSSSGNWHCDSTWLGDRVITTSTRTWALPTYNNHLYKQISNGTSGGSTNDNTYFGYSTPWGYFDFNRFHCHFSPRDWQRLINNNWGFRPKRLSFKPFNIQVKEVTQNEGTKTIANNLTSTIQVFTDSEYQLPYVLGSAHQGCLPPFPADVFMIPQYGYLTLNNGSQAVGRSSFYCLEYFPSQMLRTGNNFEFSYTFEDVPFHSSYAHSQSLDRLMNPLIDQYLHYLSRTQSTGGTQGTQQLLFSQAGPANMSAQAKNWLPGPCYRQQRVSTTLSQNNNSNFAWTGATKYHLNGRDSLVNPGVAMATHKDDEERFFPSSGVLMFGKQGAGRDNVDYSSVMLTSEEEIKTTNPVATEQYGVVADNLQQTNTGPIVGNVNSQGALPGMVWQNRDVYLQGPIWAKIPHTDGNFHPSPLMGGFGLKHPPPQILIKNTPVPADPPTTFSQAKLASFITQYSTGQVSVEIEWELQKENSKRWNPEIQYTSNYYKSTNVDFAVNTEGTYSEPRPIGTRYLTRNL

SEQ ID NO: 446 - DNA, 2217 bp, Artificial Sequence
  Description of Artificial Sequence: Synthetic polynucleotide
atggctgctgacggttatcttccagattggctcgaggacaacctctctgagggcattcgcgagtggtgggacctgaaacctggagcccccaagcccaaggccaaccagcagaagcaggacgacggccggggtctggtgcttcctggctacaagtacctcggacccttcaacggactcgacaagggggagcccgtcaacgcggcggacgcagcggccctcgagcacgacaaggcctacgaccagcagctcaaagcgggtgacaatccgtacctgcggtataaccacgccgacgccgagtttcaggagcgtctgcaagaagatacgtcttttgggggcaacctcgggcgagcagtcttccaggccaagaagcgggttctcgaacctctcggtctggttgaggaagctgctaagacggctcctggaaagaagagaccggtagaaccgtcacctcagcgttcccccgactcctccacgggcatcggcaagaaaggccagcagcccgctaaaaagagactgaactttggtcagactggcgactcagagtcagtccccgaccctcaaccaatcggagaaccaccagcaggcccctctggtctgggatctggtacaatggctgcaggcggtggcgctccaatggcagacaataacgaaggcgccgacggagtgggtagttcctcaggaaattggcattgcgattccacatggctgggcgacagagtcatcaccaccagcacccgaacctgggccctgcccacctacaacaaccacctctacaagcaaatatccaatgggacatcgggaggaagcaccaacgacaacacctacttcggctacagcaccccctgggggtattttgacttcaacagattccactgccacttctcaccacgtgactggcagcgactcatcaacaacaactggggattccggccaaaaagactcagcttcaagctcttcaacatccaggtcaaggaggtcacgcagaatgaaggcaccaagaccatcgccaataaccttaccagcacgattcaggtatttacggactcggaataccagctgccgtacgtcctcggctccgcgcaccagggctgcctgcctccgttcccggcggacgtcttcatgattccccagtacggctaccttacactgaacaatggaagtcaagccgtaggccgttcctccttctactgcctggaatattttccatctcaaatgctgcgaactggaaacaattttgaattcagctacaccttcgaggacgtgcctttccacagcagctacgcacacagccagagcttggaccgactgatgaatcctctcatcgaccagtacctgtactacttatccagaactcagtccacaggaggaactcaaggtacccagcaattgttattttctcaagctgggcctgcaaacatgtcggctcaggctaagaactggctacctggaccttgctaccggcagcagcgagtctctacgacactgtcgcaaaacaacaacagcaactttgcttggactggtgccaccaaatatcacctgaacggaagagactctttggtaaatcccggtgtcgccatggcaacccacaaggacgacgaggaacgcttcttcccgtcgagtggagtcctgatgtttggaaaacagggtgctggaagagacaatgtggactacagcagcgttatgctaaccagcgaagaagaaattaaaaccactaaccctgtagccacagaacaatacggtgtggtggctgataacttgcagcaaaccaatacggggcctattgtgggaaatgtcaacagccaaggagccttacctggcatggtctggcagaaccgagacgtgtacctgcagggtcccatctgggccaagattcctcacacggacggcaacttccacccttcaccgctaatgggaggatttggactgaagcacccacctcctcagatcctgatcaagaacacgccggtacctgcggatcctccaacaacgttcagccaggcgaaattggcttccttcattacgcagtacagcaccggacaggtcagcgtggaaatcgagtgggagctgcagaaggagaacagcaaacgctggaacccagagattcagtacacttcaaactactacaaatctacaaatgtggactttgctgtcaatacagagggaacttattctgagcctcgccccattggtactcgttacctcacccgtaatctgtaa

SEQ ID NO: 447 - protein, 738 aa, Artificial Sequence; identical to SEQ ID NO: 99
  Description of Artificial Sequence: Synthetic polypeptide

SEQ ID NO: 448 - protein, 738 aa, Artificial Sequence
  Description of Artificial Sequence: Synthetic polypeptide
MAADGYLPDWLEDNLSEGIREWWDLKPGAPKPKANQQKQDDGRGLVLPGYKYLGPFNGLDKGEPVNAADAAALEHDKAYDQQLKAGDNPYLRYNHADAEFQERLQEDTSFGGNLGRAVFQAKKRVLEPLGLVEEAAKTAPGKKRPVEPSPQRSPDSSTGIGKKGQQPAKKRLNFGQTGDSESVPDPQPIGEPPAGPSGLGSGTMAAGGGAPMADNNEGADGVGSSSGNWHCDSTWLGDRVITTSTRTWALPTYNNHLYKQISNGTSGGSTNDNTYFGYSTPWGYFDFNRFHCHFSPRDWQRLINNNWGFRPKRLSFKLFNIQVKEVTQDEGTKTIANNLTSTIQVFTDSEYQLPYVLGSAHQGCLPPFPADVFMIPQYGYLTLNNGSQAVGRSSFYCLEYFPSQMLRTGNNFEFSYTFEDVPFHSSYAHSQSLDRLMNPLIDQYLYYLSRTQSTGGTQGTQQLLFSQAGPANMSARAKNWLPGPCYRQQRVSTTLSQNNNSNFAWTGATKYHLNGRDSLVNPGVAMATHKDDEERFFPSSGVLMFGKQGAGRDNVDYSSVMLTSEEEIKTTNPVATEQYGVVADNLQQANTGPIVGNVNSQGALPGMVWQNRDVYLQGPIWAKIPHTDGNFHPSPLMGGFGLKHPPPQILIKNTPVPADPPTTFSQAKLASFITQYSTGQVSVEIEWELQKENSKRWNPEIQYTSNYYKSTNVDFAVNSEGTYSEPRPIGTRYLTRNL

SEQ ID NO: 449 - DNA, 2217 bp, Artificial Sequence
  Description of Artificial Sequence: Synthetic polynucleotide
atggctgctgacggttatcttccagattggctcgaggacaacctctctgagggcattcgcgagtggtgggacctgaaacctggagcccccaagcccaaggccaaccagcagaagcaggacgacggccggggtctggtgcttcctggctacaagtacctcggacccttcaacggactcgacaagggggagcccgtcaacgcggcggacgcagcggccctcgagcacgacaaggcctacgaccagcagctcaaagcgggtgacaatccgtacctgcggtataaccacgccgacgccgagtttcaggagcgtctgcaagaagatacgtcttttgggggcaacctcgggcgagcagtcttccaggccaagaagcgggttctcgaacctctcggtctggttgaggaagctgctaagacggctcctggaaagaagagaccggtagaaccgtcacctcagcgttcccccgactcctccacgggcatcggcaagaaaggccagcagcccgctaaaaagagactgaactttggtcagactggcgactcagagtcagtccccgaccctcaaccaatcggagaaccaccagcaggcccctctggtctgggatctggtacaatggctgcaggcggtggcgctccaatggcagacaataacgaaggcgccgacggagtgggtagttcctcaggaaattggcattgcgattccacatggctgggcgacagagtcatcaccaccagcacccgaacctgggccctgcccacctacaacaaccacctctacaagcaaatatccaatgggacatcgggaggaagcaccaacgacaacacctacttcggctacagcaccccctgggggtattttgacttcaacagattccactgccacttctcaccacgtgactggcagcgactcatcaacaacaactggggattccggccaaaaagactcagcttcaagctcttcaacatccaggtcaaggaggtcacgcaggatgaaggcaccaagaccatcgccaataaccttaccagcacgattcaggtatttacggactcggaataccagctgccgtacgtcctcggctccgcgcaccagggctgcctgcctccgttcccggcggacgtcttcatgattccccagtacggctaccttacactgaacaatggaagtcaagccgtaggccgttcctccttctactgcctggaatattttccatctcaaatgctgcgaactggaaacaattttgaattcagctacaccttcgaggacgtgcctttccacagcagctacgcacacagccagagcttggaccgactgatgaatcctctcatcgaccagtacctgtactacttatccagaactcagtccacaggaggaactcaaggtacccagcaattgttattttctcaagctgggcctgcaaacatgtcggctcgggctaagaactggctacctggaccttgctaccggcagcagcgagtctctacgacactgtcgcaaaacaacaacagcaactttgcttggactggtgccaccaaatatcacctgaacggaagagactctttggtaaatcccggtgttgctatggcaacgcataaggacgacgaggaacgtttctttccatcgagcggagtcctgatgtttggaaaacagggtgctggaagagacaatgtggactatagcagcgttatgctaaccagcgaggaagaaattaaaaccactaaccctgtagccacagaacaatacggtgtggtggctgacaacttgcagcaagccaatacagggcctattgtgggaaatgtcaacagccaaggagccttacctggcatggtctggcagaaccgagacgtgtacctgcagggtcccatctgggccaaaattcctcacacggacggcaattttcacccgtctcctctgatgggcggctttggactgaagcacccacctccccagatcctgatcaagaatacgccggtacctgcggatcctccaacgacgttcagccaggcaaaattggcttccttcatcacgcagtacagcaccggccaggtcagcgtggagatcgagtgggagctgcagaaggagaacagcaagcgatggaacccagaaattcagtacacttccaactactacaaatctacaaatgtggactttgctgtcaattctgagggtacatattcagagcctcgccccattggtactcgttatctgacacgtaatctgtaa

SEQ ID NO: 450 - DNA, 2211 bp, Artificial Sequence
  Description of Artificial Sequence: Synthetic polynucleotide
atggctgccgatggttatcttccagattggctcgaggacaacctctctgagggcattcgcgagtggtgggacttgaaacctggagccccgaaacccaaagccaaccagcaaaagcaggacgacggccggggcctggtgcttcctggctacaagtacctcggacccttcaacggactcgacaagggggagcccgtcaacgcggcggacgcagcggccctcgagcacgacaaggcctacgaccagcagctcgaagcgggtgacaatccgtacctgcggtataaccacgccgacgccgagtttcaggagcgtctgcaagaagatacgtcttttgggggcaacctcgggcgagcagtcttccaggccaagaagcgggttctcgaacctctcggtctggttgaggaaggcgctaagacggctcctggaaagaagagaccagtagagcagtcaccccaagaaccagactcctcctcgggcatcggcaagaaaggccaacagcccgccagaaaaagactcaattttggccagactggcgactcagagtcagttccagaccctcaacctctcggagaacctccagcagcgccctctggtgtgggacctaatacaatggctgcaggcggtggcgcaccaatggcagacaataacgaaggcgccgacggagtgggtagttcctcgggaaattggcattgcgattccacatggctgggcgacagagtcatcaccaccagcacccgaacctgggccctgcccacctacaacaaccacctctacaagcaaatctccaacgggacatcgggaggagccaccaacgacaacacctacttcggctacagcaccccctgggggtattttgactttaacagattccactgccacttttcaccacgtgactggcagcgactcatcaacaacaactggggattccggcccaagagactcagcttcaagctcttcaacatccaggtcaaggaggtcacgcagaatgaaggcaccaagaccatcgccaataacctcaccagcaccatccaggtgtttacggactcggagtaccagctgccgtacgttctcggctctgcccaccagggctgcctgcctccgttcccggcggacgtgttcatgattccccagtacggctacctaacactcaacaacggtagtcaggccgtgggacgctcctccttctactgcctggaatactttccttcgcagatgctgagaaccggcaacaacttccagtttacttacaccttcgaggacgtgcctttccacagcagctacgcccacagccagagcttggaccggctgatgaatcctctgattgaccagtacctgtactacttgtctcggactcaaacaacaggaggcacggcaaatacgcagactctgggcttcagccaaggtgggcctaatacaatggccaatcaggcaaagaactggctgccaggaccctgttaccgccaacaacgcgtctcaacgacaaccgggcaaaacaacaatagcaactttgcctggactgctgggaccaaataccatctgaatggaagaaattcattggctaatcctggcatcgctatggcaacacacaaagacgacgaggagcgttttttcccagtaacgggatcctgtttttggcaacaaaatgctgccagagacaatgcggattacagcgatgtcatgctcaccagcgaggaagaaatcaaaaccactaaccctgtggctacagaggaatacggtatcgtggcagataacttgcagcagcaaaacacggctcctcaaattggaactgtcaacagccagggggccttacccggtatggtctggcagaaccgggacgtgtacctgcagggtcccatctgggccaagattcctcacacggacggcaacttccacccgtctccgctgatgggcggctttggcctgaaacatcctccgcctcagatcctgatcaagaacacgcctgtacctgcggatcctccgaccaccttcaaccagtcaaagctgaactctttcatcacgcaatacagcaccggacaggtcagcgtggaaattgaatgggagctacagaaggaaaacagcaagcgctggaaccccgagatccagtacacctccaactactacaaatctacaagtgtggactttgctgttaatacagaaggcgtgtactctgaaccccgccccattggcacccgttacctcacccgtaatctgtaa

SEQ ID NO: 451 - protein, 736 aa, Artificial Sequence
  Description of Artificial Sequence: Synthetic polypeptide
MAADGYLPDWLEDNLSEGIREWWDLKPGAPKPKANQQKQDDGRGLVLPGYKYLGPFNGLDKGEPVNAADAAALEHDKAYDQQLEAGDNPYLRYNHADAEFQERLQEDTSFGGNLGRAVFQAKKRVLEPLGLVEEGAKTAPGKKRPVEQSPQEPDSSSGIGKKGQQPARKRLNFGQTGDSESVPDPQPLGEPPAAPSGVGPNTMAAGGGAPMADNNEGADGVGSSSGNWHCDSTWLGDRVITTSTRTWALPTYNNHLYKQISNGTSGGATNDNTYFGYSTPWGYFDFNRFHCHFSPRDWQRLINNNWGFRPKRLSFKLFNIQVKEVTQNEGTKTIANNLTSTIQVFTDSEYQLPYVLGSAHQGCLPPFPADVFMIPQYGYLTLNNGSQAVGRSSFYCLEYFPSQMLRTGNNFQFTYTFEDVPFHSSYAHSQSLDRLMNPLIDQYLYYLSRTQTTGGTANTQTLGFSQGGPNTMANQAKNWLPGPCYRQQRVSTTTGQNNNSNFAWTAGTKYHLNGRNSLANPGIAMATHKDDEERFFPVTGSCFWQQNAARDNADYSDVMLTSEEEIKTTNPVATEEYGIVADNLQQQNTAPQIGTVNSQGALPGMVWQNRDVYLQGPIWAKIPHTDGNFHPSPLMGGFGLKHPPPQILIKNTPVPADPPTTFNQSKLNSFITQYSTGQVSVEIEWELQKENSKRWNPEIQYTSNYYKSTSVDFAVNTEGVYSEPRPIGTRYLTRNL

SEQ ID NO: 452 - DNA, 2214 bp, Artificial Sequence
  Description of Artificial Sequence: Synthetic polynucleotide
atggctgctgacggttatcttccagattggctcgaggacaacctctctgagggcattcgcgagtggtgggacctgaaacctggagcccccaagcccaaggccaaccagcagaagcaggacgacggccggggtctggtgcttcctggctacaagtacctcggacccttcaacggactcgacaagggggagcccgtcagcgcggcggacgcagcggccctcgagcacgacaaggcctgcgaccagcggctcaaagcgggtgacaatccgtacctgcggtataaccacgccgacgccgagtttcaggagcgtctgcaagaagatacgtcttttgggggcaacctcgggcgagcagtcttccaggccaagaagcgggttctcgaacctctcggtctggttgaggaagctgctaagacggctcctggaaagaagggaccggtagaaccgtcacctcagcgttcccccgactcctccacgggcatcggcaagaaaggccagcagcccgctagaaagagactgaactttgggcagactggcgactcagagtcagtccccgaccctcaaccaatcggagaaccaccagcaggcccctctggtctgggatctggtacaatggctgcaggcggtggcgcaccaatggctgacaataacgagggcgccgacggagtgggtaatgcctcaggaaattggcattgcgattccacatggctgggcgacagagtcatcaccaccagcacccgaacctgggctttgcccacctacaacaatcacctctacaagcaaatctccagtcagtcagcaggtagcaccaacgacaacgtctacttcggctacagcaccccctgggggtattttgacttcaacagattccactgtcacttctcaccacgtgactggcagcggctcatcaacaacaactggggattccggcccaagaagctcaacttcaagctgttcaacatccaggtcaaggaggtcacaacgaatgacggcgtcacgaccatcgccaataaccttaccagcacggttcaggtcttttcggactcggaataccagctgccctacgtcctcggctccgcacaccagggctgcctgcctccgttcccggcggacgtcttcatgattccccagtacggctacctgactctgaacaatggcagccaatcggtgggtcgttcctctttctactgcctggaatatttcccttctcaaatgctgagaacgggcaacaacttcaccttcagctacaccttcgaggacgttcccttccacagcagctacgcacacagccagagcctggaccggctgatgaatcctcttatcgaccagtacctgtattacctggccagaacacagagcaacgcaggaggcacagctggcaatcgggaactgcagttttatcagggcgggcctaccaccatggccgaacaagccaaaaactggctgcctggaccttgcttccggcaacaaagagtctccaagacgctggatcaaaacaacaacagcaactttgcttggactggtgccaccaaataccatctaaatggaagaaattcattggttaatcccggtgtcgccatggcaacccacaaggacgacgaggaacgcttcttcccttcgagcggagtcctgatttttggaaaaactggagcagctaataagactacactggaaaatgtgttaatgacaaatgaagaggaaattcgtcctaccaacccggtagccaccgaggaatacgggactgttagcagcaacctgcaggcggctaacactgcagcccagacacaagttgtcaacaaccagggagccttacctggtatggtctggcagaaccgggacgtgtacctgcagggtcccatctgggccaagattcctcacacggacggcaactttcacccgtctccgctgatgggcggctttggactgaagcatccgcctcctcagatcctgatcaaaaacactcctgttcctgctaatcccccggaggtgtttacgcctgccaagtttgcttctttcatcacacagtacagcaccggccaggtcagcgtggagatcgagtgggagctgcagaaggagaacagcaagcgctggaacccagagattcagtatacctccaattttgacgaacagactggtgtggactttgccgttgacagccagggtgtttattctgagcctcgccccattggtactcgttacctcacccgtaatctgtaa

SEQ ID NO: 453 - protein, 737 aa, Artificial Sequence
  Description of Artificial Sequence: Synthetic polypeptide
MAADGYLPDWLEDNLSEGIREWWDLKPGAPKPKANQQKQDDGRGLVLPGYKYLGPFNGLDKGEPVSAADAAALEHDKACDQRLKAGDNPYLRYNHADAEFQERLQEDTSFGGNLGRAVFQAKKRVLEPLGLVEEAAKTAPGKKGPVEPSPQRSPDSSTGIGKKGQQPARKRLNFGQTGDSESVPDPQPIGEPPAGPSGLGSGTMAAGGGAPMADNNEGADGVGNASGNWHCDSTWLGDRVITTSTRTWALPTYNNHLYKQISSQSAGSTNDNVYFGYSTPWGYFDFNRFHCHFSPRDWQRLINNNWGFRPKKLNFKLFNIQVKEVTTNDGVTTIANNLTSTVQVFSDSEYQLPYVLGSAHQGCLPPFPADVFMIPQYGYLTLNNGSQSVGRSSFYCLEYFPSQMLRTGNNFTFSYTFEDVPFHSSYAHSQSLDRLMNPLIDQYLYYLARTQSNAGGTAGNRELQFYQGGPTTMAEQAKNWLPGPCFRQQRVSKTLDQNNNSNFAWTGATKYHLNGRNSLVNPGVAMATHKDDEERFFPSSGVLIFGKTGAANKTTLENVLMTNEEEIRPTNPVATEEYGTVSSNLQAANTAAQTQVVNNQGALPGMVWQNRDVYLQGPIWAKIPHTDGNFHPSPLMGGFGLKHPPPQILIKNTPVPANPPEVFTPAKFASFITQYSTGQVSVEIEWELQKENSKRWNPEIQYTSNFDEQTGVDFAVDSQGVYSEPRPIGTRYLTRNL

SEQ ID NO: 454 - DNA, 2214 bp, Artificial Sequence
  Description of Artificial Sequence: Synthetic polynucleotide
atggctgccgatggttatcttccagattggctcgaggacaacctctctgagggcattcgcgagtggtgggacctgaaacctggagccccgaaacccaaagccaaccagcaaaagcaggacgacggccggggtctggtgcttcctggctacaagtacctcggacccttcaacggactcgacaagggggagcccgtcaacgcggcggacgcagcggccctcgagcacgacaaggcctacgaccagcagctcaaagcgggtgacaatccgtacctgcggtataaccacgccgacgccgagtttcaggagcgtctgcaagaagatacgtcttttgggggcaacctcgggcgagcagtcttccaggccaagaagcgggttctcgaacctctcggtctggttgaggaagctgctaagacggctcctggaaagaagagaccggtagaaccgtcacctcagcgttcccccgactcctccacgggcatcggcaagaaaggccagcagcccgctagaaagagactgaactttgggcagactggcgactcagagtcagtccccgaccctcaaccaatcggagaaccaccagcaggcccctctggtctgggatctggtacaatggctgcaggcggtggcgctccaatggcagacaataacgaaggcgccgacggagtgggtaatgcctcaggaaattggcattgcgattccacatggctgggcgacagagtcatcaccaccagcacccgaacctgggctttgcccacctacaacaaccacctctacaagcaaatctccagtcagtcagcaggtagcaccaacgacaacgtctacttcggctacagcaccccctgggggtattttgacttcaacagattccactgtcacttctcaccacgtgactggcagcggctcatcaacaacaactggggattccggcccaagaagctcaacttcaagctgttcaacatccaggtcaaggaggtcacaacgaatgacggcgtcacgaccatcgccaataaccttaccagcacggttcaggtcttttcggactcggaataccagctgccctacgtcctcggctccgcacaccagggctgcctgcctccgttcccggcggacgtcttcatgattcctcagtacggctacctgactctcaacaacggtagtcaggccgtgggacgttcctccttctactgcctggagtacttcccctctcagatgctgagaacgggcaacaacttttccttcagctacactttcgaggacgtgcctttccacagcagctacgcgcacagccagagtttggacaggctgatgaatcctctcatcgaccagtacctgtactacctgtcaagaacccagtctacgggaggcacagcgggaacccagcagttgctgttttctcaggccgggcctagcaacatgtcgactcaggccagaaactggctgcctggaccctgctacagacagcagcgcgtctccacgacactgtcgcaaaacaacaacagcaactttgcctggactggtgccaccaagtatcatctgaacggcagagactctctggtgaatccgggcgtcgccatggcaaccaacaaggacgacgaggaccgcttcttcccatccagcggcatcctcatgtttggcaagcagggagctggaaaagacaacgtggactatagcaacgtgatgctaaccagcgaggaagaaatcaagaccaccaaccccgtggccacagaacagtatggcgtggtggctgataacctacagcagcaaaacaccgctcctattgtgggggccgtcaacagccagggagccttacctggcatggtctggcagaaccgggacgtgtacctgcagggtcctatttgggccaagattcctcacacagatggcaactttcacccgtctcctttaatgggcggctttggacttaaacatccgcctcctcagatccttatcaaaaacactcctgttcctgcggatcctccaacagcgttcaaccaggccaagctgaattctttcatcacgcagtacagcaccggacaagtcagcgtggagatcgagtgggagctgcagaaggagaacagcaagcgctggaacccagagattcagtatacttccaactactacaaatctacaaatgtggactttgctgttaatactgagggtgcttactctgagcctcgccccattggcactcgttacctcacccgtaatctgtaa

SEQ ID NO: 455 - protein, 737 aa, Artificial Sequence
  Description of Artificial Sequence: Synthetic polypeptide
MAADGYLPDWLEDNLSEGIREWWDLKPGAPKPKANQQKQDDGRGLVLPGYKYLGPFNGLDKGEPVNAADAAALEHDKAYDQQLKAGDNPYLRYNHADAEFQERLQEDTSFGGNLGRAVFQAKKRVLEPLGLVEEAAKTAPGKKRPVEPSPQRSPDSSTGIGKKGQQPARKRLNFGQTGDSESVPDPQPIGEPPAGPSGLGSGTMAAGGGAPMADNNEGADGVGNASGNWHCDSTWLGDRVITTSTRTWALPTYNNHLYKQISSQSAGSTNDNVYFGYSTPWGYFDFNRFHCHFSPRDWQRLINNNWGFRPKKLNFKLFNIQVKEVTTNDGVTTIANNLTSTVQVFSDSEYQLPYVLGSAHQGCLPPFPADVFMIPQYGYLTLNNGSQAVGRSSFYCLEYFPSQMLRTGNNFSFSYTFEDVPFHSSYAHSQSLDRLMNPLIDQYLYYLSRTQSTGGTAGTQQLLFSQAGPSNMSTQARNWLPGPCYRQQRVSTTLSQNNNSNFAWTGATKYHLNGRDSLVNPGVAMATNKDDEDRFFPSSGILMFGKQGAGKDNVDYSNVMLTSEEEIKTTNPVATEQYGVVADNLQQQNTAPIVGAVNSQGALPGMVWQNRDVYLQGPIWAKIPHTDGNFHPSPLMGGFGLKHPPPQILIKNTPVPADPPTAFNQAKLNSFITQYSTGQVSVEIEWELQKENSKRWNPEIQYTSNYYKSTNVDFAVNTEGAYSEPRPIGTRYLTRNL

SEQ ID NO: 456 - DNA, 2217 bp, Artificial Sequence
  Description of Artificial Sequence: Synthetic polynucleotide
atggctgccgatggttatcttccagattggctcgaggacaacctctctgagggcattcgcgagtggtgggacctgaaacctggagccccgaaacccaaagccaaccagcaaaagcaggacgacggccggggtctggtgcttcctggctacaagtacctcggacccttcaacggactcgacaagggggagcccgtcaacgcggcggacgcagcggccctcgagcacgacaaggcctacgaccagcagctcaaagcgggtgacaatccgtacctgcggtataatcacgccgacgccgagtttcaggagcgtctgcaagaagatacgtcttttgggggcaacctcgggcgagcagtcttccaggccaagaagcgggttctcgaacctctcggtctggttgaggaaggcgctaagacggctcctggaaagaagagaccggtagagccgtcaccacagcgttcccccgactcctccacgggcatcggcaagaaaggccagcagcccgccagaaagagactcaatttcggtcagactggcgactcagagtcagtccccgaccctcaacctatcggagaacctccagcagcgccctctagtgtgggatctggtacaatggctgcaggcggtggcgcaccaatggcagacaataacgaaggtgccgacggagtgggtagttcctcgggaaattggcattgcgattccacatggctgggcgacagagtcatcaccaccagcacccgaacctgggccctgcccacctacaacaaccacctctacaagcaaatctccaacgggacctcgggaggcagcaccaacgacaacacctactttggctacagcaccccctgggggtattttgactttaacagattccactgccacttctcaccacgtgactggcagcgactcatcaacaacaactggggattccggcccaagagactcagcttcaagctcttcaacatccaggtcaaagaggtcacgcagaatgaaggcaccaagaccatcgccaataacctcaccagcaccatccaggtgtttacggactcggaataccagctgccgtacgtcctcggctctgcccaccagggctgcctgcctccgttcccggcggacgtcttcatgattcctcagtacggctacctgactctcaacaacggtagtcaggccgtgggacgttcctccttctactgcctggagtacttcccctctcagatgctgagaacgggcaacaacttttccttcagctacactttcgaggacgtgcctttccacagcagctacgcgcacagccagagtttggacaggctgatgaatcctctcatcgaccagtacctgtactacctgtcaagaacccagtctacgggaggcacagcgggaacccagcagttgctgttttctcaggccgggcctagcaacatgtcggctcaggccagaaactggctgcctggaccctgctacagacagcagcgcgtctccacgacactgtcgcaaaacaacaacagcaactttgcctggactggtgccaccaagtatcatctgaacggcagagactctctggtgaatccgggcgtcgccatggcaaccaacaaggacgacgaggaccgcttcttcccatccagcggcatcctcatgtttggcaagcagggagctggaaaagacaacgtggactatagcaacgtgatgctaaccagcgaggaagaaatcaaggccaccaaccccgtggccacagaacagtatggcgtggtggctgataacctacagcagcaaaacaccgctcctattgtgggggccgtcaacagccagggagccttacctggcatggtctggcagaaccgggacgtgtacctgcagggtcctatttgggccaagattcctcacacagatggcaactttcacccgtctcctttaatgggcggctttggacttaaacatccgcctcctcagatcctcatcaaaaacactcctgttcctgcggatcctccaacagcgttcaaccaggccaagctgaattctttcatcacgcagtacagcaccggacaagtcagcgtggagatcgagtgggagctgcagaaggagaacagcaagcgctggaacccagagattcagtatacttccaactactacaaatctacaaatgtggactttgctgttaatactgagggtgtttactctgagcctcgccccattggcactcgttacctcacccgtaatctgtaa

SEQ ID NO: 457 - protein, 738 aa, Artificial Sequence
  Description of Artificial Sequence: Synthetic polypeptide
MAADGYLPDWLEDNLSEGIREWWDLKPGAPKPKANQQKQDDGRGLVLPGYKYLGPFNGLDKGEPVNAADAAALEHDKAYDQQLKAGDNPYLRYNHADAEFQERLQEDTSFGGNLGRAVFQAKKRVLEPLGLVEEGAKTAPGKKRPVEPSPQRSPDSSTGIGKKGQQPARKRLNFGQTGDSESVPDPQPIGEPPAAPSSVGSGTMAAGGGAPMADNNEGADGVGSSSGNWHCDSTWLGDRVITTSTRTWALPTYNNHLYKQISNGTSGGSTNDNTYFGYSTPWGYFDFNRFHCHFSPRDWQRLINNNWGFRPKRLSFKLFNIQVKEVTQNEGTKTIANNLTSTIQVFTDSEYQLPYVLGSAHQGCLPPFPADVFMIPQYGYLTLNNGSQAVGRSSFYCLEYFPSQMLRTGNNFSFSYTFEDVPFHSSYAHSQSLDRLMNPLIDQYLYYLSRTQSTGGTAGTQQLLFSQAGPSNMSAQARNWLPGPCYRQQRVSTTLSQNNNSNFAWTGATKYHLNGRDSLVNPGVAMATNKDDEDRFFPSSGILMFGKQGAGKDNVDYSNVMLTSEEEIKATNPVATEQYGVVADNLQQQNTAPIVGAVNSQGALPGMVWQNRDVYLQGPIWAKIPHTDGNFHPSPLMGGFGLKHPPPQILIKNTPVPADPPTAFNQAKLNSFITQYSTGQVSVEIEWELQKENSKRWNPEIQYTSNYYKSTNVDFAVNTEGVYSEPRPIGTRYLTRNL

SEQ ID NO: 458 - DNA, 2217 bp, Artificial Sequence
  Description of Artificial Sequence: Synthetic polynucleotide
atggctgccgatggttatcttccagattggctcgaggacaacctctctgagggcattcgcgagtggtgggacctgaaacctggagccccgaaacccaaagccaaccagcaaaagcaggacgacggccggggtctggtgcttcctggctacaagcacctcggacccttcaacggactcgacaagggggagcccgtcaacgcggcggacgcagcggccctcgagcacgacaaggcctacgaccagcagctcaaagcgggtgacaatccgtacctgcggtataatcacgctgacgccgagtttcaggagcgtctgcaagaagatacgtcttttgggggcaacctcgggcgagcagtcttccaggccaagaagcgggttctcgaacctctcggtctggttgaggaaggcgctaagacggctcctggaaagaagagaccggtagagccgtcaccacagcgttcccccgactcctccacgggcatcggcaagaaaggccagcagcccgccagaaagagactcaatttcggtcagactggcgactcagagtcagtccccgaccctcaacctatcggagaacctccagcagcgccctctagtgtgggatctggtacaatggctgcaggcggtggcgcaccaatggcagacaataacgaaggtgccgacggagtgggtagttcctcgggaaattggcattgcgattccacatggctgggcgacagagtcatcaccaccagcacccgaacctgggccctgcccacctacaacaaccacctctacaagcaaatctccaacgggacctcgggaggcagcaccaacgacaacacctactttggctacagcaccccctgggggtattttgactttaacagattccactgccacttctcaccacgtgactggcagcgactcatcaacaacaactggggattccggcccaagagactcagcttcaagctcttcaacatccaggtcaaagaggtcacgcagaatgaaggcaccaagaccatcgccaataaccttaccagcacggttcaggtcttttcggactcggaataccagctgccctacgtcctcggctccgcacaccagggctgcctgcctccgttcccggcggacgtcttcatgattccccagtacggctacctgactctgaacaatggcagccaatcggtgggtcgttcctctttctactgcctggaatatttcccttctcaaatgctgagaacgggcaacaacttcaccttcagctacaccttcgaggacgttcccttccacagcagctacgcacacagccagagcctggaccggctgatgaatcctcttatcgaccagtacctgtattacctggccagaacacagagcaacgcaggaggcacagctggcaatcgggaactgcagttttatcagggcgggcctaccaccatggccgaacaagccaaaaactggctgcctggaccttgcttccggcaacaaagagtctccaagacgctggatcaaaacaacaacagcaactttgcttggactggtgccaccaaataccatctaaatggaagaaattcattggttaatcccggtgtcgccatggcaacccacaaggacgacgaggaacgcttcttcccttcgagcggagtcctgatttttggaaaaactggagcagctaataagactacactggaaaatgtgttaatgacaaatgaagaggaaattcgtcctaccaacccggtagccaccgaggaatacgggactgttagcagcaacctgcaggcggctaacactgcagcccagacacaagttgtcaacaaccagggagccttacctggtatggtctggcagaaccgggacgtgtacctgcagggtcccatctgggccaagattcctcacacggacggcaactttcacccgtctccgctgatgggcggctttggactgaagcatccgcctcctcagatcctgatcaaaaacactcctgttcctgctaatcccccggaggtgtttacgcctgccaagtttgcttctttcatcacacagtacagcaccggccaggtcagcgtggagatcgagtgggagctgcagaaggagaacagcaagcgctggaacccagagattcagtatacctccaattttgacaaacagactggtgtggactttgccgttgacagccagggtgtttattctgagcctcgccccattggtactcgttacctcacccgtaatctgtaa

SEQ ID NO: 459 - protein, 738 aa, Artificial Sequence
  Description of Artificial Sequence: Synthetic polypeptide
MAADGYLPDWLEDNLSEGIREWWDLKPGAPKPKANQQKQDDGRGLVLPGYKHLGPFNGLDKGEPVNAADAAALEHDKAYDQQLKAGDNPYLRYNHADAEFQERLQEDTSFGGNLGRAVFQAKKRVLEPLGLVEEGAKTAPGKKRPVEPSPQRSPDSSTGIGKKGQQPARKRLNFGQTGDSESVPDPQPIGEPPAAPSSVGSGTMAAGGGAPMADNNEGADGVGSSSGNWHCDSTWLGDRVITTSTRTWALPTYNNHLYKQISNGTSGGSTNDNTYFGYSTPWGYFDFNRFHCHFSPRDWQRLINNNWGFRPKRLSFKLFNIQVKEVTQNEGTKTIANNLTSTVQVFSDSEYQLPYVLGSAHQGCLPPFPADVFMIPQYGYLTLNNGSQSVGRSSFYCLEYFPSQMLRTGNNFTFSYTFEDVPFHSSYAHSQSLDRLMNPLIDQYLYYLARTQSNAGGTAGNRELQFYQGGPTTMAEQAKNWLPGPCFRQQRVSKTLDQNNNSNFAWTGATKYHLNGRNSLVNPGVAMATHKDDEERFFPSSGVLIFGKTGAANKTTLENVLMTNEEEIRPTNPVATEEYGTVSSNLQAANTAAQTQVVNNQGALPGMVWQNRDVYLQGPIWAKIPHTDGNFHPSPLMGGFGLKHPPPQILIKNTPVPANPPEVFTPAKFASFITQYSTGQVSVEIEWELQKENSKRWNPEIQYTSNFDKQTGVDFAVDSQGVYSEPRPIGTRYLTRNL

SEQ ID NO: 460 - protein, 737 aa, Artificial Sequence
  Description of Artificial Sequence: Synthetic polypeptide
MAADGYLPDWLEDNLSEGIREWWDLKPGAPKPKANQQKQDDGRGLVLPGYKYLGPFNGLDKGEPVNAADAAALEHDKAYDQQLKAGDNPYLRYNHADAEFQERLQEDTSFGGNLGRAVFQAKKRVLEPLGLVEEAAKTAPGKKRPVEPSPQRSPDSSTGIGKKGQQPARKRLNFGQTGDSESVPDPQPIGEPPAGPSGLGSGTMAAGGGAPMADNNKGADGVGNASGNWHCDSTWLGDRVITTSTRTWALPTYNNHLYKQISSQSAGSTNDNVYFGYSTPWGYFDFNRFHCHFSPRDWQRLINSNWGFRPKKLNFKLFNIQVKEVTTNDGVTTIANNLTSTVQVFSDSEYQLPYVLGSAHQGCLPPFPADVFMIPQYGYLTLNNGSQSVGRSSFYCLEYFPSQMLRTGNNFTFSYTFEDVPFHSSYAHSQSLDRLMNPLIDQYLYYLARTQSNAGGTAGNRELQFYQGGPTTMAEQAKNWLPGPCFRQQRVSKTLDQNNNSNFAWTGATKYHLNGRNSLVNPGVAMATHKDDEERFFPSSGVLIFGKTGAANKTTLENVLMTNEEEIRPTNPVATEEYGTVSSNLQAANTAAQTQVVNNQGALPGMVWQNRDVYLQGPIWAKIPHTDGNFHPSPLMGGFGLKHPPPQILIKNTPVPANPPEVFTPAKFASFITQYSTGQVSVEIEWELQKENSKRWNPEIQYTSNFDKQTGVDFAVDSQGVYSEPRPIGTRYLTRNL

SEQ ID NO: 461 - protein, 737 aa, Artificial Sequence
  Description of Artificial Sequence: Synthetic polypeptide
MAADGYLPDWLEDNLSEGIREWWDLKPGAPKPKANQQKQDDGRGLVLPGYKYLGPFNGLDKGEPVNAADAAALEHDKAYDQQLKAGDNPYLRYNHADAEFQERLQEDTSFGGNLGRAVFQAKKRVLEPLGLVEEAAKTAPGKKRPVEPSPQRSPDSSTGIGKKGQQPARKRLNFGQTGDSESVPDPQPIGEPPAGPSGLGSGTMAAGGGAPMADNNEGADGVGNASGNWHCDSTWLGDRVITTSTRTWALPTYNNHLYKQISSQSAGSTNDNVYFGYSTPWGYFDFNRFHCHFSPRDWQRLINSNWGFRPKKLNFKLFNIQVKEVTTNDGVTTIANNLTSTVQVFSDSEYQLPYVLGSAHQGCLPPFPADVFMIPQYGYLTLNNGSQSVGRSSFYCLEYFPSQMLRTGNNFTFSYTFEDVPFHSSYAHSQSLDRLMNPLIDQYLYYLARTQSNAGGTAGNRELQFYQGGPTTMAEQAKNWLPGPCFRQQRVSKTLDQNNNSNFAWTGATKYHLNGRNSLVNPGVAMATHKDDEERFFPSSGVLIFGKTGAANKTTLENVLMTNEEEIRPTNPVATEEYGTVSSNLQAANTAAQTQVVNNQGALPGMVWQNRDVYLQGPIWAKIPHTDGNFHPSPLMGGFGLKHPPPQILIKNTPVPANPPEVFTPAKFASFITQYSTGQVSVEIEWELQKENSKRWNPEIQYTSNFDKQTGVDFAVDSQGVYSEPRPIGTRYLTRNL

SEQ ID NO: 462 - protein, 737 aa, Artificial Sequence
  Description of Artificial Sequence: Synthetic polypeptide
MAADGYLPDWLEDNLSEGIREWWDLKPGAPKPKANQQKQDDGRGLVLPGYKYLGPFNGLDKGEPVNAADAAALEHDKAYDQQLKAGDNPYLRYNHADAEFQERLQEDTSFGGNLGRAVFQAKKRVLEPLGLVEEAAKTAPGKKRPVEPSPQRSPDSSTGIGKKGQQPARKRLNFGQTGDSESVPDPQPIGEPPAGPSGLGSGTMAAGGGAPMADNNEGADGVGNASGNWHCDSTWLGDRVITTSTRTWALPTYNNHLYKQISSQSAGSTNDNVYFGYSTPWGYFDFNRFHCHFSPRDWQRLINNNWGFRPKKLNFKLFNIQVKEVTTNDGVTTIANNLTSTVQVFSDSEYQLPYVLGSAHQGCLPPFPADVFMIPQYGYLTLNNGSQSVGRSSFYCLEYFPSQMLRTGNNFTFSYTFEDVPFHSSYAHSQSLDRLMNPLIDQYLYYLARTQSNAGGTAGNRELQFYQGGPTTMAEQAKNWLPGPCFRQQRVSKTLDQNNNSNFAWTGATKYHLNGRNSLVNPGVAMATHKDDEERFFPSSGVLIFGKTGAANKTTLENVLMTNEEEIRPTNPVATEEYGTVSSNLQAANTAAQTQVVNNQGALPGMVWQNRDVYLQGPIWAKIPHTDGNFHPSPLMGGFGLKHPPPQILIKNTPVPANPPEVFTPAKFASFITQYSTGQVSVEIEWELQKENSKRWNPEIQYTSNFDKQTGVDFAVDSQGVYSEPRPIGTRYLTRNL

SEQ ID NO: 463 - protein, 737 aa, Artificial Sequence
  Description of Artificial Sequence: Synthetic polypeptide
MAADGYLPDWLEDNLSEGIREWWDLKPGAPKPKANQQKQDDGRGLVLPGYKYLGPFNGLDKGEPVNAADAAALEHDKAYDQQLKAGDNPYLRYNHADAEFQERLQEDTSFGGNLGRAVFQAKKRVLEPLGLVEEAAKTAPGKKRPVEPSPQRSPDSSTGIGKKGQQPARKRLNFGQTGDSESVPDPQPIGEPPAGPSGLGSGTMAAGGGAPMADNNKGADGVGNASGNWHCDSTWLGDRVITTSTRTWALPTYNNHLYKQISSQSAGSTNDNVYFGYSTPWGYFDFNRFHCHFSPRDWQRLINNNWGFRPKKLNFKLFNIQVKEVTTNDGVTTIANNLTSTVQVFSDSEYQLPYVLGSAHQGCLPPFPADVFMIPQYGYLTLNNGSQSVGRSSFYCLEYFPSQMLRTGNNFTFSYTFEDVPFHSSYAHSQSLDRLMNPLIDQYLYYLARTQSNAGGTAGNRELQFYQGGPTTMAEQAKNWLPGPCFRQQRVSKTLDQNNNSNFAWTGATKYHLNGRNSLVNPGVAMATHKDDEERFFPSSGVLIFGKTGAANKTTLENVLMTNEEEIRPTNPVATEEYGTVSSNLQAANTAAQTQVVNNQGALPGMVWQNRDVYLQGPIWAKIPHTDGNFHPSPLMGGFGLKHPPPQILIKNTPVPANPPEVFTPAKFASFITQYSTGQVSVEIEWELQKENSKRWNPEIQYTSNFDKQTGVDFAVDSQGVYSEPRPIGTRYLTRNL

SEQ ID NO: 464 - DNA, 2214 bp, Artificial Sequence
  Description of Artificial Sequence: Synthetic polynucleotide
atggctgctgacggttatcttccagattggctcgaggacaacctctctgagggcattcgcgagtggtgggacctgaaacctggagcccccaagcccaaggccaaccagcagaagcaggacgacggccggggtctggtgcttcctggctacaagtacctcggacccttcaacggactcgacaagggggagcccgtcaacgcggcggacgcagcggccctcgagcacgacaaggcctacgaccagcagctcaaagcgggtgacaatccgtacctgcggtataaccacgccgacgccgagtttcaggagcgtctgcaagaagatacgtcttttgggggcaacctcgggcgagcagtcttccaggccaagaagcgggttctcgaacctctcggtctggttgaggaagctgctaagacggctcctggaaagaagagaccggtagaaccgtcacctcagcgttcccccgactcctccacgggcatcggcaagaaaggccagcagcccgctagaaagagactgaactttgggcagactggcgactcagagtcagtccccgaccctcaaccaatcggagaaccaccagcaggcccctctggtctgggatctggtacaatggctgcaggcggtggcgcaccaatggctgacaataacaagggcgccgacggagtgggtaatgcctcaggaaattggcattgcgattccacatggctgggcgacagagtcatcaccaccagcacccgaacctgggctttgcccacctacaacaaccacctctacaagcaaatctccagtcagtcagcaggtagcaccaacgacaacgtctacttcggctacagcaccccctgggggtattttgacttcaacagattccactgtcacttctcaccacgtgactggcagcggctcatcaacagcaactggggattccggcccaagaagctcaacttcaagctgttcaacatccaggtcaaggaggtcacaacgaatgacggcgtcacgaccatcgccaataaccttaccagcacggttcaggtcttttcggactcggaataccagctgccctacgtcctcggctccgcacaccagggctgcctgcctccgttcccggcggacgtcttcatgattccccagtacggctacctgactctgaacaatggcagccaatcggtgggtcgttcctctttctactgcctggaatatttcccttctcaaatgctgagaacgggcaacaacttcaccttcagctacaccttcgaggacgttcccttccacagcagctacgcacacagccagagcctggaccggctgatgaatcctcttatcgaccagtacctgtattacctggccagaacacagagcaacgcaggaggcacagctggcaatcgggaactgcagttttatcagggcgggcctaccaccatggccgaacaagccaaaaactggctgcctggaccttgcttccggcaacaaagagtctccaagacgctggatcaaaacaacaacagcaactttgcttggactggtgccaccaaataccatctaaatggaagaaattcattggttaatcccggtgtcgccatggcaacccacaaggacgacgaggaacgcttcttcccttcgagcggagtcctgatttttggaaaaactggagcagctaataagactacactggaaaatgtgttaatgacaaatgaagaggaaattcgtcctaccaacccggtagccaccgaggaatacgggactgttagcagcaacctgcaggcggctaacactgcagcccagacacaagttgtcaacaaccagggagccttacctggtatggtctggcagaaccgggacgtgtacctgcagggtcccatctgggccaagattcctcacacggacggcaactttcacccgtctccgctgatgggcggctttggactgaagcatccgcctcctcagatcctgatcaaaaacactcctgttcctgctaatcccccggaggtgtttacgcctgccaagtttgcttctttcatcacacagtacagcaccggccaggtcagcgtggagatcgagtgggagctgcagaaggagaacagcaagcgctggaacccagagattcagtatacctccaattttgacaaacagactggtgtggactttgccgttgacagccagggtgtttattctgagcctcgccccattggtactcgttacctcacccgtaatctgtaa

SEQ ID NO: 465 - DNA, 2217 bp, Artificial Sequence
  Description of Artificial Sequence: Synthetic polynucleotide
atggctgccgatggttatcttccagattggctcgaggacaacctctctgagggcattcgcgagtggtgggacctgaaacctggagccccgaaacccaaagccaaccagcaaaagcaggacgacggccggggtctggtgcttcctggctacaagtacctcggacccttcaacggactcgacaagggggagcccgtcaacgcggcggacgcagcggccctcgagcacgacaaggcctacgaccagcagctcaaagcgggtgacaatccgcacctgcggtataatcacgccgacgccgagtttcaggagcgtctgcaagaagatacgtcttttgggggcaacctcgggcgagcagtcttccaggccaagaagcgggttctcgaacctctcggtctggttgaggaaggcgctaagacggctcctggaaagaagagaccggtagagccgtcaccacagcgttcccccgactcctccacgggcatcggcaagaaaggccagcagcccgccagaaagagactcaatttcggtcagactggcgactcagagtcagtccccgaccctcaacttatcggagaacctccagcagcgccctctagtgtgggatctggtacaatggctgcaggcggtggcgcaccaatggcagacaataacgaaggtgccgacggagtgggtagttcctcgggaaattggcattgcgattccacatggctgggcgacagagtcatcaccaccagcacccgaacctgggccctgcccacctacaacaaccacctctacaagcaaatctccaacgggacctcgggaggcagcaccaacgacaacacctactttggctacagcaccccctgggggtattttgactttaacagattccactgccacttctcaccacgtgactggcagcgactcatcaacaacaactggggattccggcccaagagactcagcttcaagctcttcaacatccaggtcaaagaggtcacgcagaatgaaggcaccaagaccatcgccaataacctcaccagcaccatccaggtgtttacggactcggagtaccagctgccgtacgtcctcggctctgcccaccagggctgcctgcctccgttcccggcggacgtcttcatgattcctcagtacggcaacctgactctcaacaacggtagtcaggccgtgggacgttcctccttctactgcctggagtacttcccctctcagatgctgagaacgggcaacaacttttccttcagctacactttcgaggacgtgcctttccacagcagctacgcgcacagccagagtttggacaggctgatgaatcctctcatcgaccagtacctgtactacctgtcaagaacccagtctacgggaggcacagcgggaacccagcagttgctgttttctcaggccgggcctagcaacatgtcggctcaggccagaaactggctgcctggaccctgctacagacagcagcgcgtctccacgacactgtcgcaaaacaacaacagcaactttgcctggactggtgccaccaagtatcatctgaacggcagagactctctggtgaatccgggcgtcgccatggcaaccaacaaggacgacgaggaccgcttcttcccatccagcggcatcctcatgtttggcaagcagggagctggaaaagacaacatgggctatagcaacgtgatgctaaccagcgaggaagaaatcaagaccaccaaccccgtggccacagaacagtatggcgtggtggctgataacctacagcagcaaaacaccgctcctattgtgggggccgtcaacagccagggagccttacctggcatggtctggcagaaccgggacgtgtacctgcagggtcctatttgggccaagattcctcacacagatggcaactttcacccgtctcctttaatgggcggctttggacttaaacatccgcctcctcagatcctcatcaaaaacactcctgttcctgcggatcctccaacagcgttcaaccaggccaagctgaattctttcatcacgcagtacggcaccggacaagtcagcgtggagatcgagtgggagctgcagaaggagaacagcaagcgctggaacccagagattcagtatacttccaactactacaaatctacaaatgtggactttgctgttaatactgagggtgtttactctgagcctcgccccattggcactcgttacctcacccgtaatctgtaa

SEQ ID NO: 466 - protein, 738 aa, Artificial Sequence
  Description of Artificial Sequence: Synthetic polypeptide
MAADGYLPDWLEDNLSEGIREWWDLKPGAPKPKANQQKQDDGRGLVLPGYKYLGPFNGLDKGEPVNAADAAALEHDKAYDQQLKAGDNPHLRYNHADAEFQERLQEDTSFGGNLGRAVFQAKKRVLEPLGLVEEGAKTAPGKKRPVEPSPQRSPDSSTGIGKKGQQPARKRLNFGQTGDSESVPDPQLIGEPPAAPSSVGSGTMAAGGGAPMADNNEGADGVGSSSGNWHCDSTWLGDRVITTSTRTWALPTYNNHLYKQISNGTSGGSTNDNTYFGYSTPWGYFDFNRFHCHFSPRDWQRLINNNWGFRPKRLSFKLFNIQVKEVTQNEGTKTIANNLTSTIQVFTDSEYQLPYVLGSAHQGCLPPFPADVFMIPQYGNLTLNNGSQAVGRSSFYCLEYFPSQMLRTGNNFSFSYTFEDVPFHSSYAHSQSLDRLMNPLIDQYLYYLSRTQSTGGTAGTQQLLFSQAGPSNMSAQARNWLPGPCYRQQRVSTTLSQNNNSNFAWTGATKYHLNGRDSLVNPGVAMATNKDDEDRFFPSSGILMFGKQGAGKDNMGYSNVMLTSEEEIKTTNPVATEQYGVVADNLQQQNTAPIVGAVNSQGALPGMVWQNRDVYLQGPIWAKIPHTDGNFHPSPLMGGFGLKHPPPQILIKNTPVPADPPTAFNQAKLNSFITQYGTGQVSVEIEWELQKENSKRWNPEIQYTSNYYKSTNVDFAVNTEGVYSEPRPIGTRYLTRNL

SEQ ID NO: 467 - DNA, 2217 bp, Artificial Sequence
  Description of Artificial Sequence: Synthetic polynucleotide
atggctgccgatggttatcttccagattggctcgaggacaacctctctgagggcattcgcgagtggtgggacctgaaacctggagccccgaaacccaaagccaaccagcaaaagcaggacgacggccggggtctggtgcttcctggctacaagtacctcggacccttcaacggactcgacaagggggagcccgtcaacgcggcggacgcagcggccctcgagcacgacaaggcctacgaccagcagctcaaagcgggtgacaatccgtacctgcggtataatcacgccgacgccgagtttcaggagcgtctgcaagaagatacgtcttttgggggcaacctcgggcgagcagtcttccaggccaagaagcgggttctcgaacctctcggtctggttgaggaaggcgctaagacggctcctggaaagaagagaccggtagagccgtcaccacagcgttcccccgactcctccacgggcatcggcaagaaaggccagcagcccgccggaaagagactcaatttcggtcagactggcgactcagagtcagtccccgaccctcaacctatcggagaacctccagcagcgccctctagtgtgggatctggtacaatggctgcaggcggtggcgcaccaatggcagacaataacgaaggtgccgacggagtgggtagttcctcgggaaattggcattgcgattccacatggctgggcgacagagtcatcaccaccagcacccgaacctgggccctgcccacctacaacaaccacctctacaagcaaatctccaacgggacctcgggaggcagcaccaacgacaacacctactttggctacagcaccccctgggggtattttgactttaacagattccactgccacttctcaccacgtgactggcagcgactcatcaacaacaactggggattccggcccaagagactcagcttcaagctcttcaacatccaggtcaaagaggtcacgcagaatgaaggcaccaagaccatcgccaataacctcaccagcaccatccaggtgtttacggactcggaataccagctgccgtacgtcctcggctctgcccaccagggctgcctgcctccgttcccggcggacgtcttcatgattcctcagtacggctacctgactctcaacaacggtagtcaggccgtgggacgttcctccttctactgcctggagtacttcccctctcagatgctgagaacgggcaacaacttttccttcagctacactttcgaggacgtgcctttccacagcagctacgcgcacagccagagtttggacaggctgatgaatcctctcgtcgaccagtacctgtactacctgtcaagaacccagtctacgggaggcacagcgggaacccagcagttgctgttttctcaggccgggcctagcaacatgtcggctcaggccagaaactggctgcctggaccctgctacagacagcagcgcgtctccacgacactgtcgcaaaacaacaacagcaactttgcctggactggtgccaccaagtatcatctgaacggcagagactctctggtgaatccgggcgtcgccatggcaaccaacaaggacgacgaggaccgcttcttcccatccagcggcatcctcatgtttggcaagcagggagctggaaaagacaacgtggactatagcaacgtgatgctaaccagcgaggaagaaatcaagaccaccaaccccgtggccacagaacagtatggcgtggtggctgataacctacagcagcaaaacaccgctcctattgtgggggccgtcaacagccagggagccttacctggcatggtctggcagaaccgggacgtgtacctgcagggtcctatttgggccaagattcctcacacagatggcaactttcacccgtctcctttaatgggcggctttggacttaaacatccgcctcctcagatcctcatcaaaaacactcctgttcctgcggatcctccaacagcgttcaaccaggccaagctgaattctttcatcacgcagtacagcaccggacaagtcagcgtggagatcgagtgggagctgcagaaggagaacagcaagcgctggagcccagagattcagtatacttccaactactacaaatctacaaatgtggactttgctgttaatactgagggtgtttactctgagcctcgccccattggcactcgttacctcacccgtaatctgtaa

SEQ ID NO: 468 - protein, 738 aa, Artificial Sequence
  Description of Artificial Sequence: Synthetic polypeptide
MAADGYLPDWLEDNLSEGIREWWDLKPGAPKPKANQQKQDDGRGLVLPGYKYLGPFNGLDKGEPVNAADAAALEHDKAYDQQLKAGDNPYLRYNHADAEFQERLQEDTSFGGNLGRAVFQAKKRVLEPLGLVEEGAKTAPGKKRPVEPSPQRSPDSSTGIGKKGQQPAGKRLNFGQTGDSESVPDPQPIGEPPAAPSSVGSGTMAAGGGAPMADNNEGADGVGSSSGNWHCDSTWLGDRVITTSTRTWALPTYNNHLYKQISNGTSGGSTNDNTYFGYSTPWGYFDFNRFHCHFSPRDWQRLINNNWGFRPKRLSFKLFNIQVKEVTQNEGTKTIANNLTSTIQVFTDSEYQLPYVLGSAHQGCLPPFPADVFMIPQYGYLTLNNGSQAVGRSSFYCLEYFPSQMLRTGNNFSFSYTFEDVPFHSSYAHSQSLDRLMNPLVDQYLYYLSRTQSTGGTAGTQQLLFSQAGPSNMSAQARNWLPGPCYRQQRVSTTLSQNNNSNFAWTGATKYHLNGRDSLVNPGVAMATNKDDEDRFFPSSGILMFGKQGAGKDNVDYSNVMLTSEEEIKTTNPVATEQYGVVADNLQQQNTAPIVGAVNSQGALPGMVWQNRDVYLQGPIWAKIPHTDGNFHPSPLMGGFGLKHPPPQILIKNTPVPADPPTAFNQAKLNSFITQYSTGQVSVEIEWELQKENSKRWSPEIQYTSNYYKSTNVDFAVNTEGVYSEPRPIGTRYLTRNL

SEQ ID NO: 469 - DNA, 2217 bp, Artificial Sequence
  Description of Artificial Sequence: Synthetic polynucleotide
atggttgccgatggttatcttccagattggctcgaggacaacctctctgagggcattcgcgagtggtgggacctgaaacctggagccccgaaacccaaagccaaccagcaaaagcagggcgacggccggggtctggtgcttcctggctacaagtacctcggacccttcaacggactcgacaagggggagcccgtcaacgcggcggacgcagcggccctcgagcacgacaaggcctacgaccagcagcttaaagcgggtgacaatccgtacctgcggtataatcacgccgacgccgagcttcaggagcgtctgcaagaagatacgtcttttgggggcaacctcgggcgagcagtcttccaggccaagaagcgggttctcgaacctctcggtctggttgaggaaggcgctaagacggctcctggaaagaagagaccggtagagccgtcaccacagcgttcccccgactcctccacgggcatcggcaagaaaggccagcagcccgccagaaagagactcaatttcggtcagactggcgactcagagtcagtccccgaccctcaacctatcggagaacctccagcagcgccctctagtgtgggatctggtacaatggctgcaggcggtggcgcgccaatggcagacaataacgaaggtgccgacggagtgggtagttcctcgggaaattggcattgcgattccacatggctgggcgacagagtcatcaccaccagcacccgaacctgggccctgcccacctacaacaaccacctctacaagcaaatctccaacgggacctcgggaggcagcaccaacgacaacacctactttggctacagcaccccctgggggtattttgactttaacagattccactgccacttctcaccacgtgactggcagcgactcatcaacaacaactggggattccggcccaagagactcagcttcaagctcttcaacatccaggtcaaagaggtcacgcagaatgaaggcaccaagaccatcgccaataacctcaccagcaccatccaggtgtttacggactcggaataccagctgccgtacgtcctcggctctgcccaccagggctgccagcctccgttcccggcggacgtcttcatgattcctcagtacggctacctgactctcaacaacggtagtcaggccgtgggacgttcctccttctactgcctggagtacttcccctctcagatgctgagaacgggcaacaacttttccttcagctacactttcgaggacgtgcctttccacagcagctacgcgcacagccagagtttggacaggctgatgaatcctctcatcgaccagtacctgtactacctgtcaagaacccagtctacgggaggcacagcgggaacccagcagttgctgttttctcaggccgggcctagcaacatgtcggctcaggccagaaactggctgcctggaccctgctacagacagcagcgcgtctccacgacactgtcgcaaaacaacaacagcaactttgcctggactggtgccaccaagtatcatctgaacggcagagactctctggtgaatccgggcgtcgccatggcaaccaacaaggacgacgaggaccgcttcttcccatccagcggcatcctcatgtttggcaagcagggagctggaaaagacaacgtggactatagcaacgtgatgctaaccagcgaggaagaaatcaagaccaccaaccccgtggccacagaacagtatggcgtggtggctgataacctacagcagcaaaacaccgctcctattgtgggggccgtcaacagccagggagccttacctggcatggtctggcagaaccgggacgtgtacctgcagggtcctatttgggccaagattcctcacacagatggcaactttcacccgtctcctttaatgggcggctttggacttaaacatccgcctcctcagatcctcatcaaaaacactcctgttcctgcggatcctccaacagcgttcaaccaggccaagctgaattctttcatcacgcagtacagcaccggacaagtcagcgtggagatcgagtgggagccgcagaaggagaacagcaagcgctggaacccagagattcagtatacttccaactactacaaatctacaaatgtggactttgctgttaatactgagggtgtttactctgagcctcgccccattggcactcgttacctcacccgtaatctgtaa

SEQ ID NO: 470 - protein, 738 aa, Artificial Sequence
  Description of Artificial Sequence: Synthetic polypeptide
MVADGYLPDWLEDNLSEGIREWWDLKPGAPKPKANQQKQGDGRGLVLPGYKYLGPFNGLDKGEPVNAADAAALEHDKAYDQQLKAGDNPYLRYNHADAELQERLQEDTSFGGNLGRAVFQAKKRVLEPLGLVEEGAKTAPGKKRPVEPSPQRSPDSSTGIGKKGQQPARKRLNFGQTGDSESVPDPQPIGEPPAAPSSVGSGTMAAGGGAPMADNNEGADGVGSSSGNWHCDSTWLGDRVITTSTRTWALPTYNNHLYKQISNGTSGGSTNDNTYFGYSTPWGYFDFNRFHCHFSPRDWQRLINNNWGFRPKRLSFKLFNIQVKEVTQNEGTKTIANNLTSTIQVFTDSEYQLPYVLGSAHQGCQPPFPADVFMIPQYGYLTLNNGSQAVGRSSFYCLEYFPSQMLRTGNNFSFSYTFEDVPFHSSYAHSQSLDRLMNPLIDQYLYYLSRTQSTGGTAGTQQLLFSQAGPSNMSAQARNWLPGPCYRQQRVSTTLSQNNNSNFAWTGATKYHLNGRDSLVNPGVAMATNKDDEDRFFPSSGILMFGKQGAGKDNVDYSNVMLTSEEEIKTTNPVATEQYGVVADNLQQQNTAPIVGAVNSQGALPGMVWQNRDVYLQGPIWAKIPHTDGNFHPSPLMGGFGLKHPPPQILIKNTPVPADPPTAFNQAKLNSFITQYSTGQVSVEIEWEPQKENSKRWNPEIQYTSNYYKSTNVDFAVNTEGVYSEPRPIGTRYLTRNL

SEQ ID NO: 471 - DNA, 2217 bp, Artificial Sequence
  Description of Artificial Sequence: Synthetic polynucleotide
atggctgccgatggttatcttccagattggctcgaggacaacctctctgagggcattcgcgagtggtgggacctgaaacctggagccccgaaacccaaagccaaccagcaaaagcaggacgacggccggggtctggtgcttcctggctacaagtacctcggacccttcaacggactcgacaagggggagcccgtcaacgcggcggacgcagcggccctcgagcacgacaaggcctacgaccagcagctcaaagcgggtgacaatccgtacctgcggtataatcacgccgacgccgagtttcaggagcgtctgcaagaagatacgtcttttgggggcaacctcgggcgagcagtcttccaggccaagaagcgggttctcgaacctctcggtctggttgaggaaggcgctaagacggctcctggaaagaagagaccggtagagccgtcaccacagcgttcccccgactcctccacgggcatcggcaagaaaggccagcagcccgccagaaagagactcaatttcggtcagactggcgactcagagtcagtccccgaccctcaacctatcggagaacctccagcagcgccctctagtgtgggatctggtacaatggctgcaggcggtggcgcaccaatggcagacaataacgaaggtgccgacggagtgggtagttcctcgggaaattggcattgcgattccacatggctgggcgacagagtcatcaccaccagcacccgaacctgggccctgcccacctacaacaaccacctctacaagcaaatctccaacgggacctcgggaggcagcaccaacgacaacacctactttggctacagcaccccctgggggtattttgactttaacagattccactgccacttctcaccacgtgactggcagcgactcatcaacaacaactggggattccggcccaagagactcagcttcaagctcttcaacatccaggtcaaagaggtcacgcagaatgaaggcaccaagaccatcgccaatagcctcaccagcaccatccaggtgtttacggactcggaataccagctgccgtacgtcctcggctctgcccaccagggctgcctgcctccgttcccggcggacgtcttcatgattcctcagtacggctacctgactcccaacaacggtagtcaggccgtgggacgttcctccttctactgcctggagtacttcccctctcagatgctgagaacgggcaacaacttttccttcagctacactttcgaggacgtgcctttccacagcagctacgcgcacagccagagtttggacaggctgatgaatcctctcatcgaccagtacctgtactacctgtcaagaacccagtctacgggaggcacagcgggaacccagcagttgctgtcttctcaggccgggcctagcaacatgtcggctcaggccagaaactggctgcctggaccctgctacagacagcagcgcgtctccacgacactgtcgcaaaacaacaacagcaactttgcctggactggtgccaccaagtatcatctgaacggcagagactctctggtgaatccgggcgtcgccatggcaaccaacaaggacgacgaggaccgcttcttcccatccagcggcatcctcatgtttggcaagcagggagctggaaaagacaacgtggactatagcaacgtgatgctaaccagcgaggaagaaatcaagaccaccaaccccgtggccacagaacagtatggcgtggtggctgataacctacagcagcaaaacaccgctcctattgtgggggccgtcaacagccagggagccttacctggcatggtctggcagaaccgggacgtgtacttgcagggtcctatttgggccaagattcctcacacagatggcaactttcacccgtctcctttaatgggcggctttggacttaaacatccgcctcctcagatcctcatcaaaaacactcctgttcctgcggatcctccaacagcgttcaaccaggccaagctgaattctttcatcacgcagtacagcaccggacaagtcagcgtggagatcgagtgggagctgcagaaggagaacagcaagcgctggaacccagagattcagtatacttccaactactacaaatctacaaatgtggactttgctgttaatactgagggtgtttactctgagcctcgccccattggcactcgttacctcacccgtaatctgtaa

SEQ ID NO: 472 - protein, 738 aa, Artificial Sequence
  Description of Artificial Sequence: Synthetic polypeptide
MAADGYLPDWLEDNLSEGIREWWDLKPGAPKPKANQQKQDDGRGLVLPGYKYLGPFNGLDKGEPVNAADAAALEHDKAYDQQLKAGDNPYLRYNHADAEFQERLQEDTSFGGNLGRAVFQAKKRVLEPLGLVEEGAKTAPGKKRPVEPSPQRSPDSSTGIGKKGQQPARKRLNFGQTGDSESVPDPQPIGEPPAAPSSVGSGTMAAGGGAPMADNNEGADGVGSSSGNWHCDSTWLGDRVITTSTRTWALPTYNNHLYKQISNGTSGGSTNDNTYFGYSTPWGYFDFNRFHCHFSPRDWQRLINNNWGFRPKRLSFKLFNIQVKEVTQNEGTKTIANSLTSTIQVFTDSEYQLPYVLGSAHQGCLPPFPADVFMIPQYGYLTPNNGSQAVGRSSFYCLEYFPSQMLRTGNNFSFSYTFEDVPFHSSYAHSQSLDRLMNPLIDQYLYYLSRTQSTGGTAGTQQLLSSQAGPSNMSAQARNWLPGPCYRQQRVSTTLSQNNNSNFAWTGATKYHLNGRDSLVNPGVAMATNKDDEDRFFPSSGILMFGKQGAGKDNVDYSNVMLTSEEEIKTTNPVATEQYGVVADNLQQQNTAPIVGAVNSQGALPGMVWQNRDVYLQGPIWAKIPHTDGNFHPSPLMGGFGLKHPPPQILIKNTPVPADPPTAFNQAKLNSFITQYSTGQVSVEIEWELQKENSKRWNPEIQYTSNYYKSTNVDFAVNTEGVYSEPRPIGTRYLTRNL

SEQ ID NO: 473 - protein, 738 aa, Artificial Sequence
  Description of Artificial Sequence: Synthetic polypeptide
MAADGYLPDWLEDNLSEGIREWWDLKPGAPKPKANQQKQDDGRGLVLPGYKYLGPFNGLDKGEPVNAADAAALEHDKAYDQQLKAGDNPYLRYNHADAEFQERLQEDTSFGGNLGRAVFQAKKRVLEPLGLVEEGAKTAPGKKRPVEPSPQRSPDSSTGIGKKGQQPARKRLNFGQTGDSESVPDPQPIGEPPAAPSSVGSGTMAAGGGAPMADNNEGADGVGSSSGNWHCDSTWLGDRVITTSTRTWALPTYNNHLYKQISNGTSGGSTNDNTYFGYSTPWGYFDFNRFHCHFSPRDWQRLINNNWGFRPKRLSFKLFNIQVKEVTQNEGTKTIANNLTSTIQVFTDSEYQLPYVLGSAHQGCLPPFPADVFMIPQYGYLTLNNGSQAVGRSSFYCLEYFPSQMLRTGNNFSFSYTFEDVPFHSSYVHSQSLDRLMNPLIDQYLYYLSRTQSTGGTAGTQQLLFSQAGPSNMSAQARNWLPGPCYRQQRVSTTLSQNNNSNFAWTGATKYHLNGRDSLVNSGVAMATNKDDEDRFFPSSGILMFGKQGAGKDNVDYSNVMLTSEEEIKTTNPVATEQYGVVADNLQQQNTAPIVGAVNSQGALPGMVWQNRDVYLQGPIWAKIPHTDGNFHPSPLMGGFGLKHPPPQILIKNTPVPADPPTAFNQAKLNSFITQYSTGQVSVEIEWELQKENSKRWNPEIQYTSNYYKSTNVDFAVNTEGVYSEPRPIGTRYPTRNL

SEQ ID NO: 474 - DNA, 2217 bp, Artificial Sequence
  Description of Artificial Sequence: Synthetic polynucleotide
atggctgccgatggttatcttccagattggctcgaggacaacctctctgagggcattcgcgagtggtgggacctgaaacctggagccccgaaacccaaagccaaccagcaaaagcaggacgacggccggggtctggtgcttcctggctacaagtacctcggacccttcaacggactcgacaagggggagcccgtcaacgcggcggacgcagcggccctcgagcacgacaaggcctacgaccagcagctcaaagcgggtgacaatccgtacctgcggtataatcacgccgacgccgagtttcaggagcgtctgcaagaagatacgtcttttgggggcaacctcgggcgagcagtcttccaggccaagaagcgggttctcgaacctctcggtctggttgaggaaggcgctaagacggctcctggaaagaagagaccggtagagccgtcaccacagcgttcccccgactcctccacgggcatcggcaagaaaggccagcagcccgccagaaagagactcaatttcggtcagactggcgactcagagtcagtccccgaccctcaacctatcggagaacctccagcagcgccctctagtgtgggatctggtacaatggctgcaggcggtggcgcaccaatggcagacaataacgaaggtgccgacggagtgggtagttcctcgggaaattggcattgcgattccacatggctgggcgacagagtcatcaccaccagcacccgaacctgggccctgcccacctacaacaaccacctctacaagcaaatctccaacgggacctcgggaggcagcaccaacgacaacacctactttggctacagcaccccctgggggtattttgactttaacagattccactgccacttctcaccacgtgactggcagcgactcatcaacaacaactggggattccggcccaagagactcagcttcaagctcttcaacatccaggtcaaagaggtcacgcagaatgaaggcaccaagaccatcgccaataacctcaccagcaccatccaggtgtttacggactcggaataccagctgccgtacgtcctcggctctgcccaccagggctgcctgcctccgttcccggcggacgtcttcatgattcctcagtacggctacctgactctcaacaacggtagtcaggccgtgggacgttcctccttctactgcctggagtacttcccctctcagatgctgagaacgggcaacaacttttccttcagctacactttcgaggacgtgcctttccacagcagctacgtgcacagccagagtttggacaggctgatgaatcctctcatcgaccagtacctgtactacctgtcaagaacccagtctacgggaggcacagcgggaacccagcagttgctgttttctcaggccgggcctagcaacatgtcggctcaggccagaaactggctgcctggaccctgctacagacagcagcgcgtctccacgacactgtcgcaaaacaacaacagcaactttgcctggactggtgccaccaagtatcatctgaacggcagagactctctggtgaattcgggcgtcgccatggcaaccaacaaggacgacgaggaccgcttcttcccatccagcggcatcctcatgtttggcaagcagggagctggaaaagacaacgtggactatagcaacgtgatgctaaccagcgaggaagaaatcaagaccaccaaccccgtggccacagaacagtatggcgtggtggctgataacctacagcagcaaaacaccgctcctattgtgggggccgtcaacagccagggagccttacctggcatggtctggcagaaccgggacgtgtacctgcagggtcctatttgggccaagattcctcacacagatggcaactttcacccgtctcctttaatgggcggctttggacttaaacatccgcctcctcagatcctcatcaaaaacactcctgttcctgcggatcctccaacagcgttcaaccaggccaagctgaattctttcatcacgcagtacagcaccggacaagtcagcgtggagatcgagtgggagctgcagaaggagaacagcaagcgctggaacccagagattcagtatacttccaactactacaaatctacaaatgtggactttgctgttaatactgagggtgtttactctgagcctcgccccattggcactcgttaccccacccgtaatctgtaa

SEQ ID NO: 475 - protein, 734 aa, Artificial Sequence; identical to SEQ ID NO: 300
  Description of Artificial Sequence: Synthetic polypeptide

SEQ ID NO: 476 - DNA, 2214 bp, Artificial Sequence
  Description of Artificial Sequence: Synthetic polynucleotide
atggctgctgacggttatcttccagattggctcgaggacaacctctctgagggcattcgcgagtggtgggacctgaaacctggagccccgaaacccaaagccaaccagcagaagcaggacgacggccggggtctggtgcttcctggctacaagtacctcggacccttcaacggactcgacaagggggagcccgtcaacgcggcggacgcagcggccctcgagcacgacaaggcctacgaccagcagctcaaagcgggtgacaatccgtacctgcggtataaccacgccgacgccgagtttcaggagcgtctgcaagaagatacgtcttttgggggcaacctcgggcgagcagtcttccaggccaagaagcgggttctcgaacctctcggtctggttgaggaagctgctaagacggctcctggaaagaagagaccggtagaaccgtcacctcagcgttcccccgactcctccacgggcatcggcaagaaaggccagcagcccgctagaaagagactgaactttgggcagactggcgactcagagtcagtccccgaccctcaacctctcggagaaccaccagcaggcccctctggtctgggatctggtacaatggctgcaggcggtggcgctccaatggcagacaataacgaaggcgccgacggagtgggtaatgcctcaggaaattggcattgcgattccacatggctgggcgacagagtcatcaccaccagcacccgaacctgggctttgcccacctacaacaaccacctctacaagcaaatctccagtcagtcagcaggtagcaccaacgacaacgtctacttcggctacagcaccccctgggggtattttgacttcaacagattccactgtcacttctcaccacgtgactggcagcgactcatcaacaacaactggggattccggcccaagaagctcaacttcaagctcttcaacatccaagtcaaggaggtcacgacgaatgacggcgtcacgaccatcgctaataaccttaccagcacggttcaggtcttttcggactcggagtaccagctgccgtacgtcctcggctctgcccaccagggctgcctgcctccgttcccggcggacgtcttcatgattcctcagtacggctacctgactctgaacaatggcagccaatcggtgggacgttcatccttctactgcctggaatacttcccttctcaggtgctgagaacgggtaacaacttcaccttcagttacaccttcgaggacgtgcctttccacagcagctacgcgcacagccagagcctagaccggctgatgaatcccctcatcgaccagtacctgtattacctggctagaacacagagtaacccaggaggcacatctggcaatcgggaactgcagttttaccagggcgggccttccaccatggccgaacaagccaagaactggttacctggaccttgcttccggcaacaaagagtttccaaaacactggatcaaaacaacaacagcaactttgcttggactggtgccaccaaatatcacctgaacggcagaaactcattggtgaatcctggtgtcgccatggcaactcacaaggacgacgaggaccgctttttcccatccagcggagtcctgatttttggaaaaactggagcaaccaacaagactacattggaaaacgtgttaatgacaaatgaagaagaaattcgtcctactaatcctgtggccacagaagaatacgggatagtcagcagcaatttacaagcggccaatactgcagcccagacacaagttgtcaacaaccagggagccttacctggcatggtctggcagaaccgggacgtgtacctgcagggtcccatctgggccaaaattcctcacacagacggcaactttcacccgtctccgctgatgggcggctttggactgaagcatccgcctcctcagatcctgatcaaaaacactcctgttcctgctaatcccccggaggtgtttacgcctgccaagtttgcttctttcatcacacagtacagcaccggccaggtcagcgtggagatcgagtgggagctgcagaaggagaacagcaagcgctggaacccagagattcagtatacctccaattttgacaaacagactggtgtggactttgccgttgacagccagggtgtttattctgagcctcgccccattggtactcgttacctcacccgtaatctgtaa

SEQ ID NO: 477 - protein, 737 aa, Artificial Sequence
  Description of Artificial Sequence: Synthetic polypeptide
MAADGYLPDWLEDNLSEGIREWWDLKPGAPKPKANQQKQDDGRGLVLPGYKYLGPFNGLDKGEPVNAADAAALEHDKAYDQQLKAGDNPYLRYNHADAEFQERLQEDTSFGGNLGRAVFQAKKRVLEPLGLVEEAAKTAPGKKRPVEPSPQRSPDSSTGIGKKGQQPARKRLNFGQTGDSESVPDPQPLGEPPAGPSGLGSGTMAAGGGAPMADNNEGADGVGNASGNWHCDSTWLGDRVITTSTRTWALPTYNNHLYKQISSQSAGSTNDNVYFGYSTPWGYFDFNRFHCHFSPRDWQRLINNNWGFRPKKLNFKLFNIQVKEVTTNDGVTTIANNLTSTVQVFSDSEYQLPYVLGSAHQGCLPPFPADVFMIPQYGYLTLNNGSQSVGRSSFYCLEYFPSQVLRTGNNFTFSYTFEDVPFHSSYAHSQSLDRLMNPLIDQYLYYLARTQSNPGGTSGNRELQFYQGGPSTMAEQAKNWLPGPCFRQQRVSKTLDQNNNSNFAWTGATKYHLNGRNSLVNPGVAMATHKDDEDRFFPSSGVLIFGKTGATNKTTLENVLMTNEEEIRPTNPVATEEYGIVSSNLQAANTAAQTQVVNNQGALPGMVWQNRDVYLQGPIWAKIPHTDGNFHPSPLMGGFGLKHPPPQILIKNTPVPANPPEVFTPAKFASFITQYSTGQVSVEIEWELQKENSKRWNPEIQYTSNFDKQTGVDFAVDSQGVYSEPRPIGTRYLTRNL

SEQ ID NO: 478 - DNA, 2214 bp, Artificial Sequence
  Description of Artificial Sequence: Synthetic polynucleotide
atggctgccgatggttatcttccagattggctcgaggacaacctctctgagggcattcgcgagtggtgggacctgaaacctggagccccgaaacccaaagccaaccagcaaaagcaggacgacggccggggtctggtgcttcctggctacaagtacctcggacccttcaacggactcgacaagggggagcccgtcaacgcggcggacgcagcggccctcgagcacgacaaggcctacgaccagcagctcaaagcgggtgacaatccgtacctgcggtataatcacgccgacgccgagtttcaggagcgtctgcaagaagatacgtcttttgggggcaacctcgggcgagcagtcttccaggccaagaagcgggttctcgaacctctcggtctggttgaggaaggcgctaagacggctcctggaaagaagagaccggtagagccgtcaccacagcgttcccccgactcctccacgggcatcggcaagaaaggccagcagcccgccagaaagagactcaatttcggtcagactggcgactcagagtcagtccccgaccctcaacctatcggagaacctccagcagcgccctctagtgtgggatctggtacaatggctgcaggcggtggcgcaccaatggcagacaataacgaaggtgccgacggagtgggtagttcctcgggaaattggcattgcgattccacacggctgggcgacagagtcatcaccaccagcacccggacctgggctttgcccacctacaacaaccacctctacaagcaaatctccagtcagtcagcaggtagcaccaacgacaacgtctacttcggctacagcaccccctgggggtattttgacttcaacagattccactgtcacttctcaccacgtgactggcagcggctcatcaacaacaactggggattccggcccaagaagctcaacttcaagctgttcaacatccaggtcaaggaggtcacaacgaatgacggcgtcacgaccatcgccaataaccttaccagcacggttcaggtcttttcggactcggaataccagctgccctacgtcctcggctccgcacaccagggctgcctgcctccgttcccggcggacgtcttcatgattccccagtacggctacctgactctgaacaatggcagccaatcggtgggtcgttcctctttctactgcctggaatatttcccttctcaaatgctgagaacgggcaacaacttcaccttcagctacaccttcgaggacgttcccttccacagcagctacgcacacagccagagcctggaccggctgatgaatcctcttatcgaccagtacctgtattacctggccagaacacagagcaacgcaggaggcacagctggcaatcgggaactgcagttttatcagggcgggcctaccaccatggccgaacaagccaaaaactggctgcctggaccttgcttccggcaacgaagagtctccaagacgctggatcaaaacaacaacagcaactttgcttggactggtgccaccaaataccatctaaatggaagaaattcattggttaatcccggtgtcgccatggcaacccacaaggacgacgaggaacgcttcttcccttcgagcggagtcctgatttttggaaaaactggagcagctaataagactacactggaaaatgtgttaatgacaaatgaagaggaaattcgtcctaccaacccggtagccaccgaggaatacgggactgttagcagcaacctgcaggcggctaacactgcagcccagacacaagttgtcaacaaccagggagccttacctggtatggtctggcagaaccgggacgtgtacctgcagggtcccatctgggccaagattcctcacacggacggcaactttcacccgtctccgctgatgggcggctttggactgaagcatccgcctcctcagatcctgatcaaaaacactcctgttcctgctaatcccccggaggtgtttacgcctgccaagtttgcttctttcatcacacagtacagcaccggccaggtcagcgtggagatcgagtgggagctgcagaaggagaacagcaagcgctggaacccagagattcagtatacctccaattttgacaaacagactggtgtggactttgccgttgacagccagggtgtttattctgagcctcgccccattggtactcgttacctcacccgtaatctgtaa

SEQ ID NO: 479 - protein, 737 aa, Artificial Sequence
  Description of Artificial Sequence: Synthetic polypeptide
MAADGYLPDWLEDNLSEGIREWWDLKPGAPKPKANQQKQDDGRGLVLPGYKYLGPFNGLDKGEPVNAADAAALEHDKAYDQQLKAGDNPYLRYNHADAEFQERLQEDTSFGGNLGRAVFQAKKRVLEPLGLVEEGAKTAPGKKRPVEPSPQRSPDSSTGIGKKGQQPARKRLNFGQTGDSESVPDPQPIGEPPAAPSSVGSGTMAAGGGAPMADNNEGADGVGSSSGNWHCDSTRLGDRVITTSTRTWALPTYNNHLYKQISSQSAGSTNDNVYFGYSTPWGYFDFNRFHCHFSPRDWQRLINNNWGFRPKKLNFKLFNIQVKEVTTNDGVTTIANNLTSTVQVFSDSEYQLPYVLGSAHQGCLPPFPADVFMIPQYGYLTLNNGSQSVGRSSFYCLEYFPSQMLRTGNNFTFSYTFEDVPFHSSYAHSQSLDRLMNPLIDQYLYYLARTQSNAGGTAGNRELQFYQGGPTTMAEQAKNWLPGPCFRQRRVSKTLDQNNNSNFAWTGATKYHLNGRNSLVNPGVAMATHKDDEERFFPSSGVLIFGKTGAANKTTLENVLMTNEEEIRPTNPVATEEYGTVSSNLQAANTAAQTQVVNNQGALPGMVWQNRDVYLQGPIWAKIPHTDGNFHPSPLMGGFGLKHPPPQILIKNTPVPANPPEVFTPAKFASFITQYSTGQVSVEIEWELQKENSKRWNPEIQYTSNFDKQTGVDFAVDSQGVYSEPRPIGTRYLTRNL

SEQ ID NO: 480 - DNA, 2208 bp, Artificial Sequence
  Description of Artificial Sequence: Synthetic polynucleotide
atggctgccgatggttatcttccagattggctcgaggacactctctctgaaggaataagacagtggtggaagctcaaacctggcccaccaccaccaaagcccgcagagcggcataaggacgacagcaggggtcttgtgcttcctgggtacaagtacctcggacccttcaacggactcgacaagggggagccggtcaacgaggcagacgccgcggccctcgagcacgacaaggcctacgaccggcagctcgacagcggagacaacccgtacctcaagtacaaccacgccgacgcggagtttcaggagcgtcttaaagaagatacgtcttttgggggcaacctcggacgagcagtcttccaggcgaaaaagagggttcttgaacctctgggcctggttgaggaacctgttaagacggctccgggaaaaaagaggccggtagagcactctcctgcggagccagactcctcctcgggaaccggaaaagcgggccagcagcctgcaagaaaaagattgaattttggtcagactggagacgcagactccgtacctgacccccagcctctcggacagccaccagcagccccctctggtttgggatctactacaatggctacaggcagtggcgcaccaatggcagacaataacgagggtgccgatggagtgggtaattcttcaggaaattggcattgcgattcccaatggctgggcgacagagtcatcaccaccagcacccgaacctgggcccagcccacctacaacaaccacctctacaagcaaatctcaagccaatcaggagcctcaaacgacaaccactactttggctacagcaccccttgggggtattttgacttcaacagattccactgccacttttcaccacgtgactggcaaagactcatcaacaacaactggggattccgacccaagagactcaacttcaagctctttaacattcaagtcaaagaggtcacgcagaatgacggtacgacgacgattgccaataaccttaccagcacggttcaggtgtttactgactcggagtaccagctcccgtacgtcctcgggtcggcgcatcaaggatgcctcccgccgtttccagcggacgtcttcatggtcccacagtatggatacctcaccctgaacaacgggagtcaggcggtaggacgctcttccttttactgcctggagtactttccttctcagatgcttcgtactggaaacaactttcagttcagctacacctttgaagacgttcctttccacagcagctacgctcacagccagagtctggatcggctgatgaatcctctgatcgaccagtacctgtattatctgaacaaaacacaatcaaatagtggagctcttcagcagtctcggctactgtttagtcaagctggacccaccagcatgtctcttcaagctaaaaactggctacctggaccttgctacagacagcagcgtctgtcaaagcaggcaaacgacaacaacaacagcaactttccctggactgcggctacaaagtaccacctaaatggccgggactcgttggttaatccaggaccagctatggccagtcacaaagacgatgaagaaaagtttttccccatgcatggaaccctgatatttggtaaacaaggaacaaatgctaacgacgcggatttggacaatgtcatgattacagatgaagaagaaatccgcaccaccaatcccgtggctacggagcagtacggatatgtgtcaaataatttgcaaaactcaaatactggtccaactactggaactgtcaatcaccgaggagcgttacctggcatggtgtggcaggatcgagacgtgtacctgcagggacccatttgggccaagattcctcacaccgatggacactttcatccttctccactgatgggaggttttgggctcaaacacccgcctcctcagatcatgatcaaaaacactcccgttccagccaatcctcccacaaacttcagttctgccaagtttgcttctttcatcacacagtattccacggggcaggtcagcgtggagatcgagtgggagctgcagaaagagaacagcaaacgctggaatcccgaaattcagtacacttccaactacaacaaatctgttaatgtggactttactgtggacactaatggcgtgtattcagagcctcgccccattggcaccagatacctgactcgtaatctgtaa

SEQ ID NO: 481 - protein, 735 aa, Artificial Sequence
  Description of Artificial Sequence: Synthetic polypeptide
MAADGYLPDWLEDTLSEGIRQWWKLKPGPPPPKPAERHKDDSRGLVLPGYKYLGPFNGLDKGEPVNEADAAALEHDKAYDRQLDSGDNPYLKYNHADAEFQERLKEDTSFGGNLGRAVFQAKKRVLEPLGLVEEPVKTAPGKKRPVEHSPAEPDSSSGTGKAGQQPARKRLNFGQTGDADSVPDPQPLGQPPAAPSGLGSTTMATGSGAPMADNNEGADGVGNSSGNWHCDSQWLGDRVITTSTRTWAQPTYNNHLYKQISSQSGASNDNHYFGYSTPWGYFDFNRFHCHFSPRDWQRLINNNWGFRPKRLNFKLFNIQVKEVTQNDGTTTIANNLTSTVQVFTDSEYQLPYVLGSAHQGCLPPFPADVFMVPQYGYLTLNNGSQAVGRSSFYCLEYFPSQMLRTGNNFQFSYTFEDVPFHSSYAHSQSLDRLMNPLIDQYLYYLNKTQSNSGALQQSRLLFSQAGPTSMSLQAKNWLPGPCYRQQRLSKQANDNNNSNFPWTAATKYHLNGRDSLVNPGPAMASHKDDEEKFFPMHGTLIFGKQGTNANDADLDNVMITDEEEIRTTNPVATEQYGYVSNNLQNSNTGPTTGTVNHRGALPGMVWQDRDVYLQGPIWAKIPHTDGHFHPSPLMGGFGLKHPPPQIMIKNTPVPANPPTNFSSAKFASFITQYSTGQVSVEIEWELQKENSKRWNPEIQYTSNYNKSVNVDFTVDTNGVYSEPRPIGTRYLTRNL

SEQ ID NO: 482 - DNA, 2217 bp, Artificial Sequence
  Description of Artificial Sequence: Synthetic polynucleotide
atggctgccgatggttatcttccagattggctcgaggacaacctctctgagggcattcgcgagtggtgggcgctgaaacctggagccccgaagcccaaagccaaccagcaaaagcaggacgacggccggggtctggtgcttcctggctacaagtacctcggacccttcaacggactcgacaagggggagcccgtcaacgcggcggacgcagcggccctcgagcacgacaaggcctacgaccagcagctgcaggcgggtgacaatccgtacctgcggtataatcacgccgacgccgagtttcaggagcgtctgcaagaagatacgtcttttgggggcaacctcgggcgagcagtcttccaggccaagaagcgggttctcgaacctctcggtctggttgaggaaggcgctaagacggctcctggaaagaagagaccggtagagccgtcaccacagcgttcccccgactcctccacgggcatcggcaagaaaggccagcagcccgccagaaagagactcaatttcggtcagactggcgactcagagtcagtccccgaccctcaacctatcggagaacctccagcagcgccctctagtgtgggatctggtacaatggctgcaggcggtggcgcgccaatggcagacaataacgaaggtgccgacggagtgggtagttcctcgggaaattggcattgcgattccacatggctgggcgacagagtcatcaccaccagcacccgaacctgggccctgcccacctacaacaaccacctctacaagcaaacctccaacgggacctcgggaggcagcaccaacgacaacacctactttggctacagcaccccctgggggtattttgactttaacagattccactgccacttctcaccacgtgactggcagcgactcatcaacaacaactggggattccggcccaagagactcagcttcaagctcttcaacatccaggtcaaagaggtcacgcagaatgaaggcaccaagaccatcgccaataacctcaccagcaccatccaggtgtttacggactcggaataccagctgccgtacgtcctcggctctgcccaccagggctgcctgcctccgttcccggcggacgtcttcatgattcctcagtacggctacctgactctcaacaacggtagtcaggccgtgggacgttcctccttctactgcctggagtacttcccctctcagatgctgagaacgggcaacaacttttccttcagctacactttcgaggacgtgcctttccacagcagctacgcgcacagccagagtttggacaggctgatgaatcctctcatcgaccagtacctgtactacctgtcaagaacccagtctacgggaggcacagcgggaacccagcagttgctgttttctcaggccgggcctagcaacatgtcggctcaggccagaaactggctgcctggaccctgctacagacagcagcgcgtctccacgacactgtcgcaaaacaacaacagcaactttgcctggactggtgccaccaagtatcatctgaacggcagagactctctggtgaatccgggcgtcgccatggcaaccaacaaggacgacgaggaccgcttcttcccatccagcggcatcctcatgtttggcaagcagggagctggaaaagacaacgtggactatagcaacgtgatgctaaccagcgaggaagaaatcaagaccaccaaccccgtggccacagaacagtatggcgtggtggctgataacctacagcagcaaaacaccgctcctattgtgggggccgtcaacagccagggagccttacctggcatggtctggcagaaccgggacgtgtacctgcagggtcctatttgggccaagattcctcacacagatggcaactttcacccgtctcctttaatgggcggctttggacttaaacatccgcctcctcagatcctcatcaaaaacactcctgttcctgcggatcctccaacagcgttcaaccaggccaagctgaattctttcatcacgcagtacagcaccggacaagtcagcgcggagatcgagtgggagctgcagaaggagaacagcaagcgctggaacccagagattcagtatacttccaactactacaaatctacaaatgtggactttgctgttaatactgagggtgtttactctgagcctcgccccattggcactcgttacctcacccgtaatctgtaa

SEQ ID NO: 483 - protein, 738 aa, Artificial Sequence
  Description of Artificial Sequence: Synthetic polypeptide
MAADGYLPDWLEDNLSEGIREWWALKPGAPKPKANQQKQDDGRGLVLPGYKYLGPFNGLDKGEPVNAADAAALEHDKAYDQQLQAGDNPYLRYNHADAEFQERLQEDTSFGGNLGRAVFQAKKRVLEPLGLVEEGAKTAPGKKRPVEPSPQRSPDSSTGIGKKGQQPARKRLNFGQTGDSESVPDPQPIGEPPAAPSSVGSGTMAAGGGAPMADNNEGADGVGSSSGNWHCDSTWLGDRVITTSTRTWALPTYNNHLYKQTSNGTSGGSTNDNTYFGYSTPWGYFDFNRFHCHFSPRDWQRLINNNWGFRPKRLSFKLFNIQVKEVTQNEGTKTIANNLTSTIQVFTDSEYQLPYVLGSAHQGCLPPFPADVFMIPQYGYLTLNNGSQAVGRSSFYCLEYFPSQMLRTGNNFSFSYTFEDVPFHSSYAHSQSLDRLMNPLIDQYLYYLSRTQSTGGTAGTQQLLFSQAGPSNMSAQARNWLPGPCYRQQRVSTTLSQNNNSNFAWTGATKYHLNGRDSLVNPGVAMATNKDDEDRFFPSSGILMFGKQGAGKDNVDYSNVMLTSEEEIKTTNPVATEQYGVVADNLQQQNTAPIVGAVNSQGALPGMVWQNRDVYLQGPIWAKIPHTDGNFHPSPLMGGFGLKHPPPQILIKNTPVPADPPTAFNQAKLNSFITQYSTGQVSAEIEWELQKENSKRWNPEIQYTSNYYKSTNVDFAVNTEGVYSEPRPIGTRYLTRNL

SEQ ID NO: 484 - DNA, 2217 bp, Artificial Sequence
  Description of Artificial Sequence: Synthetic polynucleotide
atggctgctgacggttatcttccagattggctcgaggacaacctctctgagggcattcgcgagtggtgggacctgaaacctggagcccccaagcccaaggccaaccagcagaagcaggacgacggccggggtctggtgcttcctggctacaagtacctcggacccttcaacggactcgacaagggggagcccgtcaacgcggcggacgcagcggccctcgagcacgacaaggcctacgaccagcagctcaaagcgggtgacaatccgtacctgcggtataatcacgccgacgccgagtttcaggagcgtctgcaagaagatacgtcttttgggggcaacctcgggcgagcagtcttccaggccaagaagcgggttctcgaacctctcggtctggttgaggaagctgctaagacggctcctggaaagaagagaccggtagaaccgtcacctcagcgttcccccgactcctccacgggcatcggcaagaaaggccagcagcccgctagaaagagactgaactttgggcagactggcgactcagagtcagtccccgaccctcaaccaatcggagaacctccagcagcgccctctagtgtgggatctggtacaatggccgcaggcggtggcgcaccaatggcagacaataacgaaggtgccgacggagtgggtagttcctcgggaaattggcattgcgattccacatggctgggcgacagagtcatcaccaccagcacccgaacctgggccctgcccacctacaacaaccacctctacaagcaaatctccaacgggacctcgggaggcagcaccaacgacaacacctactttggctacagcaccccctgggggtattttgactttaacagattccactgccacttctcaccacgtgactggcagcgactcatcaacaacaactggggattccggcccaagagactcagcttcaagctcttcaacatccaggtcaaagaggtcacgcagaatgaaggcaccaagaccatcgccaataacctcaccagcaccatccaggtgtttacggactcggaataccagctgccgtacgtcctcggctctgcccaccagggctgcctgcctccgttcccggcggacgtcttcatgattcctcagtacggctacctgactctcaacaacggtagtcaggccgtgggacgttcctccttctactgcctggagtacttcccctctcagatgctgagaacgggcaacaacttttccttcagctacactttcgaggacgtgcctttccacagcagctacgcgcacagccagagtttggacaggctgatgaatcctctcatcgaccagtacctgtactacctgtcaagaacccagtctacgggaggcacagcgggaacccagcagctgctgttttctcaggccgggcctagcaacatgtcggctcaggccagaaactggctgcctggaccctgctacagacagcagcgcgtctccacgacactgtcgcaaaacaacaacagcaactttgcctggactggtgccaccaagtatcatctgaacggcagagactctctggtgaatccgggcgtcgccatggcaaccaacaaggacgacgaggaccgcttcttcccatccagcggcatcctcatgtttggcaagcagggagctggaaaagacaacgtggactatagcaacgtgatgctaaccagcgaggaagaaatcaagaccaccaaccccgtggccacagaacagtatggcgtggtggctgataacctacagcagcaaaacaccgctcctattgtgggggccgtcaacagccagggagccttacctggcatggtctggcagaaccgggacgtgtacctgcagggtcctatttgggccaagattcctcacacagatggcaactttcacccgtctcctttaatgggcggctttggacttaaacatccgcctcctcagatcctcatcaaaagcactcctgttcctgcggatcctccaacagcgttcaaccaggccaagctgaattctttcatcacgcagtacagcaccggacaagtcagcgtggagatcgagtgggagctgcagaaggagaacagcaagtgctggaacccagagattcagtatacttccaactactacaaatctacaaatgtggactttgctgttaatactgagggtgtttactctgagcctcgccccattggcactcgttacctcacccgtaatctgtaa

SEQ ID NO: 485 - protein, 738 aa, Artificial Sequence
  Description of Artificial Sequence: Synthetic polypeptide
MAADGYLPDWLEDNLSEGIREWWDLKPGAPKPKANQQKQDDGRGLVLPGYKYLGPFNGLDKGEPVNAADAAALEHDKAYDQQLKAGDNPYLRYNHADAEFQERLQEDTSFGGNLGRAVFQAKKRVLEPLGLVEEAAKTAPGKKRPVEPSPQRSPDSSTGIGKKGQQPARKRLNFGQTGDSESVPDPQPIGEPPAAPSSVGSGTMAAGGGAPMADNNEGADGVGSSSGNWHCDSTWLGDRVITTSTRTWALPTYNNHLYKQISNGTSGGSTNDNTYFGYSTPWGYFDFNRFHCHFSPRDWQRLINNNWGFRPKRLSFKLFNIQVKEVTQNEGTKTIANNLTSTIQVFTDSEYQLPYVLGSAHQGCLPPFPADVFMIPQYGYLTLNNGSQAVGRSSFYCLEYFPSQMLRTGNNFSFSYTFEDVPFHSSYAHSQSLDRLMNPLIDQYLYYLSRTQSTGGTAGTQQLLFSQAGPSNMSAQARNWLPGPCYRQQRVSTTLSQNNNSNFAWTGATKYHLNGRDSLVNPGVAMATNKDDEDRFFPSSGILMFGKQGAGKDNVDYSNVMLTSEEEIKTTNPVATEQYGVVADNLQQQNTAPIVGAVNSQGALPGMVWQNRDVYLQGPIWAKIPHTDGNFHPSPLMGGFGLKHPPPQILIKSTPVPADPPTAFNQAKLNSFITQYSTGQVSVEIEWELQKENSKCWNPEIQYTSNYYKSTNVDFAVNTEGVYSEPRPIGTRYLTRNL

SEQ ID NO: 486 - protein, 738 aa, Artificial Sequence
  Description of Artificial Sequence: Synthetic polypeptide
MAADGYLPDWLEDNLSEGIREWWDLKPGAPKPKANQQKQDDGRGLVLPGYKYLGPFNGLDKGEPVNAADAAALEHDKAYDQQLKAGDNPYLRYNHADAEFQERLQEDTSFGGNLGRAVFQAKKRVLEPLGLVEEAAKTAPGKKRPVEPSPQRSPDSSTGIGKKGQQPARKRLNFGQTGDSESVPDPQPIGEPPAAPSSVGSGTMAAGGGAPMADNNEGADGVGSSSGNWHCDSTWLGDRVITTSTRTWALPTYNNHLYKQISNGTSGGSTNDNTYFGYSTPWGYFDFNRFHCHFSPRDWQRLINNNWGFRPKRLSFKLFNIQVKEVTQNEGTKTIANNLTSTIQVFTDSEYQLPYVLGSAHQGCLPPFPADVFMIPQYGYLTLNNGSQAVGRSSFYCLEYFPSQMLRTGNNFSFSYTFEDVPFHSSYAHSQSLDRLMNPLIDQYLYYLSRTQSTGGTAGTQQLLFSQAGPSNMSAQARNWLPGPCYRQQRVSTTLSQNNNSNFAWTGATKYHLNGRDSLVNPGVAMATNKDDEDRFFPSSGILMFGKQGAGKDNVDYSNVMLTSEEEIKTTNPVATEQYGVVADNLQQQNTAPIVGAVNSQGALPGMVWQNRDVYLQGPIWAKIPHTDGNFHPSPLMGGFGLKHPPPQILIKSTPVPADPPTAFNQAKLNSFITQYSTGQVSVEIEWELQKENSKRWNPEIQYTSNYYKSTNVDFAVNTEGVYSEPRPIGTRYLTRNL

SEQ ID NO: 487 - DNA, 2217 bp, Artificial Sequence
  Description of Artificial Sequence: Synthetic polynucleotide
atggctgctgacggttatcttccagattggctcgaggacaacctctctgagggcattcgcgagtggtgggacctgaaacctggagcccccaagcccaaggccaaccagcagaagcaggacgacggccggggtctggtgcttcctggctacaagtacctcggacccttcaacggactcgacaagggggagcccgtcaacgcggcggacgcagcggccctcgagcacgacaaggcctacgaccagcagctcaaagcgggtgacaatccgtacctgcggtataaccacgccgacgccgagtttcaggagcgtctgcaagaagatacgtcttttgggggcaacctcgggcgagcagtcttccaggccaagaagcgggttctcgaacctctcggtctggttgaggaagctgctaagacggctcctggaaagaagagaccggtagaaccgtcacctcagcgttcccccgactcctccacgggcatcggcaagaaaggccagcagcccgctagaaagagactgaactttgggcagactggcgactcagagtcagtccccgaccctcaaccaatcggagaaccaccagcaggcccctctggtctgggatctggtacaatggctgcaggcggtggcgcaccaatggctgacaataacgagggcgccgacggagtgggtaatgcctcaggaaattggcattgcgattccacatggctgggcgacagagtcatcaccaccagcacccgaacctgggctttgcccacctacaacaaccacctctacaagcaaatctccagtcagtcagcaggtagcaccaacgacaacgtctacttcggctacagcaccccctgggggtattttgacttcaacagattccactgtcacttctcaccacgtgactggcagcggctcatcaacaacaactggggattccggcccaagaagctcaacttcaagctgttcaacatccaggtcaaggaggtcacaacgaatgacggcgtcacgaccatcgccaataaccctaccagcacggttcaggtcttttcggactcggaataccagctgccctacgtcctcggctccgcacaccagggctgcctgcctccgttcccggcggacgtcttcatgattccccagtacggctacctgactctgaacaatggcagccaatcggtgggtcgttcctctttctactgcctggaatatttcccttctcaaatgctgagaacgggcaacaacttcaccttcagctacaccttcgaggacgttcccttccacagcagctacgcacacagccagagcctggaccggctgatgaatcctcttatcgaccagtacctgtattacctggccagaacacagagcaacgcaggaggcacagctggcaatcgggaactgcagttttatcagggcgggcctaccaccatggccgaacaagccaaaaactggctgcctggaccctgctacagacagcagcgcgtctccacgacactgtcgcaaaacaacaacagcaactttgcctggactggtgccaccaagtatcatctgaacggcagagactctctggtgaatccgggcgtcgccatggcaaccaacaaggacgacgaggaccgcttcttcccatccagcggcatcctcatgtttggcaagcagggagctggaaaagacaacgtggactatagcaacgtgatgctaaccagcgaggaagaaatcaagaccaccaaccccgtggccacagaacagtatggcgtggtggctgataacctacagcagcaaaacaccgctcctattgtgggggccgtcaacagccagggagccttacctggcatggtctggcagaaccgggacgtgtacctgcagggtcctatttgggccaagattcctcacacagatggcaactttcacccgtctcctttaatgggcggctttggacttaaacatccgcctcctcagatcctcatcaaaaacactcctgttcctgcggatcctccaacagcgttcaaccaggccaagctgaattctttcatcacgcagtacagcaccggacaagtcagcgtggagatcgagtgggagctgcagaaggagaacagcaagcgctggaacccagagattcagtatacttccaactactacaaatctacaaatgtggactttgctgttaatactgagggtgtttactctgagcctcgccccattggcactcgttacctcacccgtaatctgtaa

SEQ ID NO: 488 - protein, 738 aa, Artificial Sequence
  Description of Artificial Sequence: Synthetic polypeptide
MAADGYLPDWLEDNLSEGIREWWDLKPGAPKPKANQQKQDDGRGLVLPGYKYLGPFNGLDKGEPVNAADAAALEHDKAYDQQLKAGDNPYLRYNHADAEFQERLQEDTSFGGNLGRAVFQAKKRVLEPLGLVEEAAKTAPGKKRPVEPSPQRSPDSSTGIGKKGQQPARKRLNFGQTGDSESVPDPQPIGEPPAGPSGLGSGTMAAGGGAPMADNNEGADGVGNASGNWHCDSTWLGDRVITTSTRTWALPTYNNHLYKQISSQSAGSTNDNVYFGYSTPWGYFDFNRFHCHFSPRDWQRLINNNWGFRPKKLNFKLFNIQVKEVTTNDGVTTIANNPTSTVQVFSDSEYQLPYVLGSAHQGCLPPFPADVFMIPQYGYLTLNNGSQSVGRSSFYCLEYFPSQMLRTGNNFTFSYTFEDVPFHSSYAHSQSLDRLMNPLIDQYLYYLARTQSNAGGTAGNRELQFYQGGPTTMAEQAKNWLPGPCYRQQRVSTTLSQNNNSNFAWTGATKYHLNGRDSLVNPGVAMATNKDDEDRFFPSSGILMFGKQGAGKDNVDYSNVMLTSEEEIKTTNPVATEQYGVVADNLQQQNTAPIVGAVNSQGALPGMVWQNRDVYLQGPIWAKIPHTDGNFHPSPLMGGFGLKHPPPQILIKNTPVPADPPTAFNQAKLNSFITQYSTGQVSVEIEWELQKENSKRWNPEIQYTSNYYKSTNVDFAVNTEGVYSEPRPIGTRYLTRNL

SEQ ID NO: 489 - DNA, 2208 bp, Artificial Sequence
  Description of Artificial Sequence: Synthetic polynucleotide
atggctgccgatggttatcttccagattggctcgaggacaacctctctgagggcattcacgagtggtgggacccgaaacctggagccccgaaacccaaagccaaccagcaaaagcaggacgacggccggggtctggtgcttcctggctacaagtacctcggacccttcaacggactcgacaagggggagcccgtcaacgcggcggacgcagcggccctcgagcacgacaaggcctacgaccagcagctcaaagcgggtgacaatccgtacctgcggtataatcacgccgacgccgagtttcaggagcgtctgcaagaagatacgtcttttgggggcaacctcgggcgagcagtcttccaggccaagaagcgggttctcgaacctctcggtctggttgaggaaggcgctaagacggctcctggaaagaagagaccggtagagccgtcaccacagcgttcccccgactcctccacgggcatcggcaagaaaggccagcagcccgccagaaagagactcaatttcggtcagactggcgactcagagtcagtccccgaccctcaacctatcggagaacctccagcagcgccctctagtgtgggatctggtacaatggctgcaggcggtggcgcaccaatggcagacaataacgaaggtgccgacggagtgggtagttcctcgggaaattggcattgcgattccacatggctgggcgacagagtcatcaccaccagcacccgaacctgggccctgcccacccacaacaaccacctctacaagcaaatctccaacgggacctcgggaggcagcaccaacgacaacgtctacttcggctacagcaccccctgggggtattttgacttcaacagattccactgtcacttctcaccacgtgaccggcagcgactcatcaacaacaactggggattccggcccaagagactcagcttcaagctcttcaacatccaggtcaaagaggtcacgcagaatgaaggcaccaagaccatcgccaataacctcaccagcaccatccaggtgtttacggactcggaataccagctgccgtacgtcctcggctctgcccaccagggctgcctgcctccgttcccggcggacgtcttcatgattcctcagtacggctacctgactctcaacaacggtagtcaggccgtgggacgttcctccttctactgcctggagtacttcccctctcagatgctgagaacgggcaacaacttttccttcagctacactttcgaggacgtgcctttccacagcagctacgcgcacagccagagtttggacaggctgatgaatcctctcatcgaccagtacctgtactacctgtcaagaacccagtctacggaaggcacagcgggaacccagcagttgctgttttctcaggccgggcctagcaacatgtcggctcaggccagaaactggctgcctggaccctgctacagacagcagcgcgtctccacgacactgtcgcaaaacaacaacagcaactttgcctggactggtgccaccaagtatcatctgaacggcagagactctctggtgaatccgggcgtcgccatggcaacccacaaggacgacgaggaacgcttcttcccttcgagcggagtcctgatttttggaaaaactggagcagctaataagactacactggaaaatgtgttaatgacaaatgaagaggaaattcgtcctaccaacccggtagccaccgaggaatacgggactgttagcagcaacctgcaggcggctaacactgcagcccagacacaagttgtcaacaaccagggagccttacctggtatggtctggcagaaccgggacgtgtacctgcagggtcccatctgggccaagattcctcacacggacggcaactttcacccgtctccgctgatgggcggctttggactgaagcatcctcagatcctgatcaaaaacactcctgttcctgctaatcccccggaggtgtttacgcctgccaagtttgcttctttcatcacacagtacagcaccggccaggtcagcgtggagatcgagtgggagctgcagaaggagaacagcaagcgctggaacccagagattcagtatacctccaattttgacaaacagactggtgtggactttgccgttgacagccagggtgtttattctgagcctcgccccattggtactcgttacctcacccgtaatctgtaa

SEQ ID NO: 490 - protein, 735 aa, Artificial Sequence
  Description of Artificial Sequence: Synthetic polypeptide
MAADGYLPDWLEDNLSEGIHEWWDPKPGAPKPKANQQKQDDGRGLVLPGYKYLGPFNGLDKGEPVNAADAAALEHDKAYDQQLKAGDNPYLRYNHADAEFQERLQEDTSFGGNLGRAVFQAKKRVLEPLGLVEEGAKTAPGKKRPVEPSPQRSPDSSTGIGKKGQQPARKRLNFGQTGDSESVPDPQPIGEPPAAPSSVGSGTMAAGGGAPMADNNEGADGVGSSSGNWHCDSTWLGDRVITTSTRTWALPTHNNHLYKQISNGTSGGSTNDNVYFGYSTPWGYFDFNRFHCHFSPRDRQRLINNNWGFRPKRLSFKLFNIQVKEVTQNEGTKTIANNLTSTIQVFTDSEYQLPYVLGSAHQGCLPPFPADVFMIPQYGYLTLNNGSQAVGRSSFYCLEYFPSQMLRTGNNFSFSYTFEDVPFHSSYAHSQSLDRLMNPLIDQYLYYLSRTQSTEGTAGTQQLLFSQAGPSNMSAQARNWLPGPCYRQQRVSTTLSQNNNSNFAWTGATKYHLNGRDSLVNPGVAMATHKDDEERFFPSSGVLIFGKTGAANKTTLENVLMTNEEEIRPTNPVATEEYGTVSSNLQAANTAAQTQVVNNQGALPGMVWQNRDVYLQGPIWAKIPHTDGNFHPSPLMGGFGLKHPQILIKNTPVPANPPEVFTPAKFASFITQYSTGQVSVEIEWELQKENSKRWNPEIQYTSNFDKQTGVDFAVDSQGVYSEPRPIGTRYLTRNL

SEQ ID NO: 491 - protein, 738 aa, Artificial Sequence
  Description of Artificial Sequence: Synthetic polypeptide
MAADGYLPDWLEDNLSEGIREWWDLKPGAPKPKANQQKQDDGRGLVLPGYKYLGPFNGLDKGEPVNAADAAALEHDKAYDQQLKAGDNPYLRYNHADAEFQERLQEDTSFGGNLGRAVFQAKKRVLEPLGLVEEGAKTAPGKKRPVEPSPQRSPDSSTGIGKKGQQPARKRLNFGQTGDSESVPDPQPIGEPPAAPSSVGSGTMAAGGGAPMADNNEGADGVGSSSGNWHCDSTWLGDRVITTSTRTWALPTYNNHLYKQISNGTSGGSTNDNTYFGYSTPWGYFDFNRFHCHFSPRDWQRPINNNWGFRPKRLSFKLFNIQVKEVTQNEGTKTIANNLTSTIQVFTDSEYQLPYVLGSAHQGCLPPFPADVFMIPQYGYLTLNNGSQAVGRSSFYCLEYFPSQMLRTGNNFSFSYPFEDVPFHSSYAHSQSLDRLMNPLIDQYLYYLSRTQSTGGTAGTQQLLFSQAGPSNMSAQARNWLPGPCYRQQRVSTTLSQNNNSNFAWTGATKYHLNGRDSLVNPGVAMATNKDDEDRFFPSSGILMFGKQGAGKDNVDYSNVMLTSEEEIKTTNPVATEQYGVVADNLQQQDTAPIVGAVNSQGALPGMVWQNRDVYLQGPIWAKIPHTDGNFHPSPLMGGFGLKHPPPQVLIKNTPVPADPPTAFNQAKLNSFITQYSTGQVSVEIEWELQKENSKRWNPEIQYTSNYYKSTNVDFAVNTEGVYSEPRPIGTRYLTRNL

SEQ ID NO: 492 - DNA, 2217 bp, Artificial Sequence
  Description of Artificial Sequence: Synthetic polynucleotide
atggctgccgatggttatcttccagattggctcgaggacaacctctctgagggcattcgcgagtggtgggacctgaaacctggagccccgaaacccaaggccaaccagcaaaagcaggacgacggccggggtctggtgcttcctggctacaagtacctcggacccttcaacggactcgacaagggggagcccgtcaacgcggcggacgcagcggccctcgagcacgacaaggcctacgaccagcagctcaaagcgggtgacaatccgtacctgcggtataatcacgccgacgccgagtttcaggagcgtctgcaagaagatacgtcttttgggggcaacctcgggcgagcagtcttccaggccaagaagcgggttctcgaacctctcggtctggttgaggaaggcgctaagacggctcctggaaagaagagaccggtagagccgtcaccacagcgttcccccgactcctccacgggcatcggcaagaaaggccagcagcccgccagaaagagactcaatttcggtcagactggcgactcagagtcagtccccgaccctcaacctatcggagaacctccagcagcgccctctagtgtgggatctggtacaatggctgcaggcggtggcgcaccaatggcagacaataacgaaggtgccgacggagtgggtagttcctcgggaaattggcattgcgattccacatggctgggcgacagagtcatcaccaccagcacccgaacctgggccctgcccacctacaacaaccacctctacaagcaaatctccaacgggacctcgggaggcagcaccaacgacaacacctactttggctacagcaccccctgggggtattttgactttaacagattccactgccacttctcaccacgtgactggcagcgacccatcaacaacaactggggattccggcccaagagactcagcttcaagctcttcaacatccaggtcaaagaggtcacgcagaatgaaggcaccaagaccatcgccaataacctcaccagcaccatccaggtgtttacggactcggaataccagctgccgtacgtcctcggctctgcccaccagggctgcctgcctccgttcccggcggacgtcttcatgattcctcagtacggctacctgactctcaacaacggtagtcaggccgtgggacgttcctccttctactgcctggagtacttcccctctcagatgctgagaacgggcaacaacttttccttcagctaccctttcgaggacgtgcctttccacagcagctacgcgcacagccagagtttggacaggctgatgaatcctctcatcgaccagtacctgtactacctgtcaagaacccagtctacgggaggcacagcgggaacccagcagttgctgttttctcaggccgggcctagcaacatgtcggctcaggccagaaactggctgcctggaccctgctacagacagcagcgcgtctccacgacactgtcgcaaaacaacaacagcaactttgcctggactggtgccaccaagtatcatctgaacggcagagactctctggtgaatccgggcgtcgccatggcaaccaacaaggacgacgaggaccgcttcttcccatccagcggcatcctcatgtttggcaagcagggagctggaaaagacaacgtggactatagcaacgtgatgctaaccagcgaggaagaaatcaagaccaccaaccccgtggccacagaacagtatggcgtggtggctgataacctacagcagcaagacaccgctcctattgtgggggccgtcaacagccagggagccttacctggcatggtctggcagaaccgggacgtgtacctgcagggtcctatttgggccaagattcctcacacagatggcaactttcacccgtctcctttaatgggcggctttggacttaaacatccgcctcctcaggtcctcatcaaaaacactcctgttcctgcggatcctccaacagcgttcaaccaggccaagctgaattctttcatcacgcagtacagcaccggacaagtcagcgtggagatcgagtgggagctgcagaaggagaacagcaagcgctggaacccagagattcagtatacttccaactactacaaatctacaaatgtggactttgctgttaatactgagggtgtttactctgagcctcgccccattggcactcgttacctcacccgtaatctgtaa

SEQ ID NO: 493 - DNA, 2214 bp, Artificial Sequence
  Description of Artificial Sequence: Synthetic polynucleotide
atggctgctgacggttatcttccagattggctcgaggacaacctctctgagggcattcgcgagtggtgggacctgaaacctggagcccccaagcccaaggccaaccagcagaagcaggacgacggccggggtctggtgcttcctggctacaagtacctcggacccttcaacggactcgacaagggggagcccgtcaacgcggcggacgcagcggccctcgagcacgacaaggcctacgaccagcagctcaaagcgggtgacaatccgtacctgcggtataaccacgccgacgccgagttccaggagcgtctgcaagaagatacgtcttttgggggcaacctcgggcgagcagtcttccaggccaagaagcgggttctcgaacctctcggtctggctgaggaagctgctaagacggctcctggaaagaagagaccggtagaaccgtcacctcagcgttcccccgactcctccacgggcatcggcaagaaaggccagcagcccgctagaaagagactgaactttgggcagactggcgactcagagtcagtccccgaccctcaaccaatcggagagccaccagcaggcccctctggtctgggatctggtacaatggctgcaggcggtggcgcaccaatggctgacaataacaagggcgccgacggagtgggtaatgcctcaggaaattggcattgcgattccacatggctgggcgacagagtcatcaccaccagcacccgaacctgggctttgcccacctacaacaaccacctctacaagcaaatctccagtcagtcagcaggtagcaccaacgacaacgtctacttcggctacagcaccccctgggggtattttgacttcaacagattccactgtcacttctcaccacgtgactggcagcggctcatcaacaacaactggggattccggcccaagaagctcaacttcaagctgttcaacatccaggtcaaggaggtcacaacgggtgacggcgtcacgaccatcgccaataaccttaccagcacggttcaggtcttttcggactcggaataccagctgccctacgtcctcggctccgcacaccagggctgcctgcctccgttcccggcggacgtcttcatgattccccagtacggctacctgactctgaacaatgacagccaatcggtgggtcgttcctctttctactgcctggaatatttcccttctcaaatgctgagaacgggcaacaacttcaccttcagctacaccttcgaggacgttcccttccacagcagctacgcacacagccagagcctggaccggctgatgaatcctcttatcgaccagtacctgtattacctggccagaacacagagcaacgcaggaggcacagctggcaatcgggaactgcagttttatcagggcgggcctaccaccatggccgaacaagccaaaaactggctgcctggaccttgcttccggcaacaaagagtctccaagacgctggatcaaaacaacaacagcaactttgcttggactggtgccaccaaataccatctaaatggaagaaattcattggttaatcccggtgtcgccatggcaacccacaaggacgacgaggaacgcttcttcccttcgagcggagtcctgatttttggaaaaactggagcagctaataagactacactggaaaatgtgttaatgacaaatgaagaggaaattcgtcctaccaacccggtagccaccgaggaatacgggactgttagcagcaacctgcaggcggctaacactgcagcccagacacaagttgtcaacaaccagggagccttacctggtatggtctggcagaaccgggacgtgtacctgcagggtcccatctgggccaagattcctcacacggacggcaactttcacccgtctccgctgatgggcggctttggactgaagcatccgcctcctcagatcctgatcaaaaacactcctgttcctgctaatcccccggaggtgtttacgcctgccaagtttgcttctttcatcacacagtacagcaccggccaggtcagcgtggagatcgagtgggagctgcagaaggagaacagcaagcgctggaacccagagattcagtatacctccaattttgacaaacagactggtgtggactttgccgttgacagccagggtgtttattctgagcctcgccccattggtactcgttacctcacccgtaatctgtaa

SEQ ID NO: 494 - protein, 737 aa, Artificial Sequence
  Description of Artificial Sequence: Synthetic polypeptide
MAADGYLPDWLEDNLSEGIREWWDLKPGAPKPKANQQKQDDGRGLVLPGYKYLGPFNGLDKGEPVNAADAAALEHDKAYDQQLKAGDNPYLRYNHADAEFQERLQEDTSFGGNLGRAVFQAKKRVLEPLGLAEEAAKTAPGKKRPVEPSPQRSPDSSTGIGKKGQQPARKRLNFGQTGDSESVPDPQPIGEPPAGPSGLGSGTMAAGGGAPMADNNKGADGVGNASGNWHCDSTWLGDRVITTSTRTWALPTYNNHLYKQISSQSAGSTNDNVYFGYSTPWGYFDFNRFHCHFSPRDWQRLINNNWGFRPKKLNFKLFNIQVKEVTTGDGVTTIANNLTSTVQVFSDSEYQLPYVLGSAHQGCLPPFPADVFMIPQYGYLTLNNDSQSVGRSSFYCLEYFPSQMLRTGNNFTFSYTFEDVPFHSSYAHSQSLDRLMNPLIDQYLYYLARTQSNAGGTAGNRELQFYQGGPTTMAEQAKNWLPGPCFRQQRVSKTLDQNNNSNFAWTGATKYHLNGRNSLVNPGVAMATHKDDEERFFPSSGVLIFGKTGAANKTTLENVLMTNEEEIRPTNPVATEEYGTVSSNLQAANTAAQTQVVNNQGALPGMVWQNRDVYLQGPIWAKIPHTDGNFHPSPLMGGFGLKHPPPQILIKNTPVPANPPEVFTPAKFASFITQYSTGQVSVEIEWELQKENSKRWNPEIQYTSNFDKQTGVDFAVDSQGVYSEPRPIGTRYLTRNL

SEQ ID NO: 495 - DNA, 2217 bp, Artificial Sequence
  Description of Artificial Sequence: Synthetic polynucleotide
atggctgccgatggttatcttccagattggctcgaggacaacctctctgagggcattcgcgagtggtgggacctgaaacctggagccccgaaacccaaagccaaccagcaaaagcaggacgacggccggggtctggtgcttcctggctacaagtacctcggacccttcaacggactcgacaagggggagcccgtcaacgcggcggacgcagcggccctcgagcacgacaaggcctacgaccagcagctcaaagcgggtgacaatccgtacctgcggtataatcacgccgacgccgagtttcaggagcgtctgcaagaagatacgtcttttgggggcaacctcgggcgagcagtcttccaggccaagaagcgggttctcgaacctctcggtctggttgaggaaggcgctaagacggctcctggaaagaagagaccggtagagccgtcaccacagcgttcccccgactcctccacgggcatcggcaagaaaggccagcagcccgccagaaagagactcaatttcggtcagactggcgactcagagtcagtccccgaccctcaacctatcggagaacctccagcagcgccctctagtgtgggatctggtacaatggctgcaggcggtggcgcaccaatggcagacaataacgaaggtgccgacggagtgggtagttcctcgggaaattggcattgcgattccacatggctgggcgacagagtcatcaccaccagcacccgaacctgggccctgcccacctacaacaaccacctctacaagcaaatctccaacgggacctcgggaggcagcaccaacgacaacacctactttggctacagcaccccctgggggtattttgactttaacagattccactgccacttctcaccacgtgactggcagcgactcatcaacaacaactggggattccggcccaagagactcagcttcaagctcttcaacatccaggtcaaagaggtcacgcagaatgaaggcaccaagaccatcgccaataacctcaccagcaccatccaggtgtttacggactcggaataccagctgccgtacgtcctcggctctgcccaccagggctgcctgcctccgttcccggcggacgtcttcatgattcctcagtacggctacctgactctcaacaacggtagtcaggccgtgggacgttcctccttctactgcctggagtacttcccctctcagatgctgagaacgggcaacaacttttccttcagctacactttcgaggacgtgcctttccacagcagctacgcgcacagccagagtttggacaggctgatgaatcctctcatcgaccagtacctgtactacctgtcaagaacccagtctacgggaggcacagcgggaacccagcagttgctgttttctcaggccgggcctagcaacatgtcggctcaggccagaaactggctgcctggaccctgctacagacagcagcgcgtctccacgacactgtcgcaaaacaacaacagcaactttgcctggactggtgccaccaagtatcatctgaacggcagagactctctggtgaatccgggcgtcgccatggcaaccaacaaggacgacgaggaccgcttcttcccatccagcggcatcctcatgtttggcaagcagggagctggaaaagacaacgtggactatagcaacgtgatgctaaccagcgaggaagaaatcaagaccaccaaccccgtggccacagaacagtatggcgtggtggctgataacctacagcagcaaaacaccgctcctattgtgggggccgtcaacagccagggagccttacctggcatggtctggcagaaccgggacgtgtacctgcagggtcctatttgggccaagattcctcacacagatggcaactttcacccgtctcctttaatgggcggctttggacttaaacatccgcctcctcagatcctcatcaaaaacactcctgttcctgcggatcctccaacagcgttcaaccaggccaagctgaattctttcatcacgcagtacagcaccggacaagtcagcgtggagatcgtgtgggagctgcagaaggagaacagcaagcgcaggaacccagagattcagtatacttccaactactacaaatctacaaatgtggactttgctgttaatactgagggtgtttactctgagcctcgccccattggcactcgttacctcacccgtaatctgtaa

SEQ ID NO: 496 - protein, 738 aa, Artificial Sequence
  Description of Artificial Sequence: Synthetic polypeptide
MAADGYLPDWLEDNLSEGIREWWDLKPGAPKPKANQQKQDDGRGLVLPGYKYLGPFNGLDKGEPVNAADAAALEHDKAYDQQLKAGDNPYLRYNHADAEFQERLQEDTSFGGNLGRAVFQAKKRVLEPLGLVEEGAKTAPGKKRPVEPSPQRSPDSSTGIGKKGQQPARKRLNFGQTGDSESVPDPQPIGEPPAAPSSVGSGTMAAGGGAPMADNNEGADGVGSSSGNWHCDSTWLGDRVITTSTRTWALPTYNNHLYKQISNGTSGGSTNDNTYFGYSTPWGYFDFNRFHCHFSPRDWQRLINNNWGFRPKRLSFKLFNIQVKEVTQNEGTKTIANNLTSTIQVFTDSEYQLPYVLGSAHQGCLPPFPADVFMIPQYGYLTLNNGSQAVGRSSFYCLEYFPSQMLRTGNNFSFSYTFEDVPFHSSYAHSQSLDRLMNPLIDQYLYYLSRTQSTGGTAGTQQLLFSQAGPSNMSAQARNWLPGPCYRQQRVSTTLSQNNNSNFAWTGATKYHLNGRDSLVNPGVAMATNKDDEDRFFPSSGILMFGKQGAGKDNVDYSNVMLTSEEEIKTTNPVATEQYGVVADNLQQQNTAPIVGAVNSQGALPGMVWQNRDVYLQGPIWAKIPHTDGNFHPSPLMGGFGLKHPPPQILIKNTPVPADPPTAFNQAKLNSFITQYSTGQVSVEIVWELQKENSKRRNPEIQYTSNYYKSTNVDFAVNTEGVYSEPRPIGTRYLTRNL

SEQ ID NO: 497 - protein, 738 aa, Artificial Sequence
  Description of Artificial Sequence: Synthetic polypeptide
MAADGYLPDWLEDNLSEGIREWWDLKPGAPKPKANQQKQDDGRGLVLPGYKYLGPFNGLDKGEPVNAADAAALEHDKAYDQQLKAGDNPYLRYNHADAEFQERLQEDTSFGGNLGRAVFQAKKRVLEPLGLVEEGAKTAPGKKRPVEPSPQRSPDSSTGIGKKGQQPARKRLNFGQTGDSESVPDPQPIGEPPAAPSSVGSGTMAAGGGAPMADNNEGADGVGSSSGNWHCDSTWLGDRVITTSTRTWALPTYNNHLYKQISNGTSGGSTNDNTYFGYSTPWGYFDFNRFHCHFSPRDWQRLINNNWGFRPKRLSFKLFNIQVKEVTQNEGTKTIANNLTSTIQVFTDSEYQLPYVLGSAHQGCLPPFPADVFMIPQYGYLTLNNGSQAVGRSSFYCLEYFPSQMLRTGNNFSFSYTFEDVPFHSSYAHSQSLDRLMNPLIDQYLYYLSRTQSTGGTAGTQQLLFSQAGPSNMSAQARNWLPGPCYRQQRVSTTLSQNNNSNFAWTGATKYHLNGRDSLVNPGVAMATNKDDEDRFFPSSGILMFGKQGAGKDNVDYSNVMLTSEEEIKTTNPVATEQYGVVADNLQQQNTAPIVGAVNSQGALPGMVWQNRDVYLQGPIWAKIPHTDGNFHPSPLMGGFGLKHPPPQILIKNTPVPADPPTAFNQAKLNSFITQYSTGQVSVEIEWELQKENSKRWNPEIQYTSNYYKSTNVDFAVNTEGVYSEPRPIGTRYLTRNL

SEQ ID NO: 498 - protein, 738 aa, Artificial Sequence
  Description of Artificial Sequence: Synthetic polypeptide
MAADGYLPDWLEDNLSEGIREWWDLKPGAPKPKANQQKQDDGRGLVLPGYKYLGPFNGLDKGEPVNAADAAALEHDKAYDQQLKAGDNPYLRYNHADAEFQERLQEDTSFGGNLGRAVFQAKKRVLEPLGLVEEGAKTAPGKKRPVEPSPQRSPDSSTGIGKKGQQPARKRLNFGQTGDSESVPDPQPIGEPPAAPSSVGSGTMAAGGGAPMADNNEGADGVGSSSGNWHCDSTWLGDRVITTSTRTWALPTYNNHLYKQISNGTSGGSTNDNTYFGYSTPWGYFDFNRFHCHFSPRDWQRLINNNWGFRPKRLSFKLFNIQVKEVTQNEGTKTIANNLTSTIQVFTDSEYQLPYVLGSAHQGCLPPFPADVFMIPQYGYLTLNNGSQAVGRSSFYCLEYFPSQMLRTGNNFSFSYTFEDVPFHSSYAHSQSLDRLMNPLIDQYLYYLSRTQSTGGTAGTQQLLFSQAGPSNMSAQARNWLPGPCYRQQRVSTTLSQNNNSNFAWTGATKYHLNGRDSLVNPGVAMATNKDDEDRFFPSSGILMFGKQGAGKDNVDYSNVMLTSEEEIKTTNPVATEQYGVVADNLQQQNTAPIVGAVNSQGALPGMVWQNRDVYLQGPIWAKIPHTDGNFHPSPLMGGFGLKHPPPQILIKNTPVPADPPTAFNQAKLNSFITQYSTGQVSVEIVWELQKENSKRWNPEIQYTSNYYKSTNVDFAVNTEGVYSEPRPIGTRYLTRNL

SEQ ID NO: 499 - protein, 738 aa, Artificial Sequence; identical to SEQ ID NO: 497
  Description of Artificial Sequence: Synthetic polypeptide

SEQ ID NO: 500 - DNA, 2214 bp, Artificial Sequence
  Description of Artificial Sequence: Synthetic polynucleotide
atggctgctgacggttatcttccagattggctcgaggacaacctctctgagggcattcgcgagtggtgggacctgaaacctggagcccccaagcccaaggccaaccagcagaagcaggacgacggccggggtctggtgcttcctggctacaagtacctcggacccttcaacggactcgacaagggggagcccgtcaacgcggcggacgcagcggccctcgagcacgacaaggcctacgaccagcagctcaaagcgggtgacaatccgtacctgcggtataaccacgccgacgccgagtttcaggagcgtctgcaagaagatacgtcttttgggggcaacctcgggcgagcagtcttccaggccaagaagcgggttctcgaacctctcggtctggttgaggaagctgctaagacggctcctggaaagaagagaccggtagaaccgtcacctcagcgttcccccgactcctccacgggcatcggcaagaaaggccagcagcccgctagaaagagactgaactttgggcagactggcgactcagagtcagtccccgaccctcaaccaatcggagaaccaccagcaggcccctctggtctgggatctggtacaatggctgcaggcggtggcgctccaatggcagacaataacgaaggcgccgacggagtgggtaatgcctcaggaaattggcattgcgattccacatggctgggcgacagagtcatcaccaccagcacccgaacctgggctttgcccacctacaacaaccacctctacaagcaaatctccagtcagtcagcaggtagcaccaacgacaacgtctacttcggctacagcaccccctgggggtattttgacttcaacagattccactgtcacttctcaccacgtgactggcagcggctcatcaacaacaactggggattccggcccaagaagctcaacttcaagctgttcaacatccaggtcaaggaggtcacaacgaatgacggcgtcacgaccatcgccaataaccttaccagcacggttcaggtcttttcggactcggaataccagctgccctacgtcctcggctccgcacaccagggctgcctgcctccgttcccggcggacgtcttcatgattccccagtacggctacctgactctgaacaatggcagccaatcggtgggtcgttcctctttctactgcctggaatatttcccttctcaaatgctgagaacgggcaacaacttcaccttcagctacaccttcgaggacgttcccttccacagcagctacgcacacagccagagcctggaccggctgatgaatcctcttatcgaccagtacctgtattacctggccagaacacagagcaacgcaggaggcacagctggcaatcgggaactgcagttttatcagggcgggcctaccaccatggccgaacaagccaaaaactggctgcctagaccttgcttccggcaacaaagagtctccaagacgctggatcaaaacaacaacagcaactttgcttggactggtgccaccaaataccatctaaatggaagaaattcattggttaatcccggtgtcgccatggcaacccacaaggacgacgaggaacgcttcttcccttcgagcggagtcctgatttttggaaaaactggagcagctaataagactacactggaaaatgtgttaatgacaaatgaagaggaaattcgtcctaccaacccggtagccaccgaggaatacgggactgttagcagcaacctgcaggcggctaacactgcagcccagacacaagttgtcaacaaccagggagccttacctggtatggtctggcagaaccgggacgtgtacctgcagggtcccatctgggccaagattcctcacacggacggcaactttcacccgtctccgctgatgggcggctttggactgaagcatccgcctcctcagatcctgatcaaaaacactcctgttcctgctaatcccccggaggtgtttacgcctgccaagtttgcttctttcatcacacagtacagcaccggccaggtcagcgtggagatcgagtgggagctgcagaaggagaacagcaagcgctggaacccagagattcagtatacctccaattttgacaaacagactggtgtggactttgccgttgacagccagggtgtttattctgagcctcgccccattggtactcgttacctcacccgtaatctgtaa

SEQ ID NO: 501 - protein, 737 aa, Artificial Sequence
  Description of Artificial Sequence: Synthetic polypeptide
MAADGYLPDWLEDNLSEGIREWWDLKPGAPKPKANQQKQDDGRGLVLPGYKYLGPFNGLDKGEPVNAADAAALEHDKAYDQQLKAGDNPYLRYNHADAEFQERLQEDTSFGGNLGRAVFQAKKRVLEPLGLVEEAAKTAPGKKRPVEPSPQRSPDSSTGIGKKGQQPARKRLNFGQTGDSESVPDPQPIGEPPAGPSGLGSGTMAAGGGAPMADNNEGADGVGNASGNWHCDSTWLGDRVITTSTRTWALPTYNNHLYKQISSQSAGSTNDNVYFGYSTPWGYFDFNRFHCHFSPRDWQRLINNNWGFRPKKLNFKLFNIQVKEVTTNDGVTTIANNLTSTVQVFSDSEYQLPYVLGSAHQGCLPPFPADVFMIPQYGYLTLNNGSQSVGRSSFYCLEYFPSQMLRTGNNFTFSYTFEDVPFHSSYAHSQSLDRLMNPLIDQYLYYLARTQSNAGGTAGNRELQFYQGGPTTMAEQAKNWLPRPCFRQQRVSKTLDQNNNSNFAWTGATKYHLNGRNSLVNPGVAMATHKDDEERFFPSSGVLIFGKTGAANKTTLENVLMTNEEEIRPTNPVATEEYGTVSSNLQAANTAAQTQVVNNQGALPGMVWQNRDVYLQGPIWAKIPHTDGNFHPSPLMGGFGLKHPPPQILIKNTPVPANPPEVFTPAKFASFITQYSTGQVSVEIEWELQKENSKRWNPEIQYTSNFDKQTGVDFAVDSQGVYSEPRPIGTRYLTRNL

SEQ ID NO: 502 - DNA, 2214 bp, Artificial Sequence
  Description of Artificial Sequence: Synthetic polynucleotide
atggctgctgacggttatcttccagattggctcgaggacaacctctctgagggcattcgcgagtggtgggacctgaaacctggagcccccaagcccaaggccaaccagcagaagcaggacgacggccggggtctggtgcttcctggctacaagtacctcggacccttcaacggactcgacaagggggagcccgtcaacgcggcggacgcagcggccctcgagcacgacaaggcctacgaccagcagctcaaagcgggtgacaatccgtacctgcggtataaccatgccgacgccgagtttcaggagcgtctgcaagaagatacgtcttttgggggcaacctcgggcgagcagtcctccaggccaagaagcgggttctcgaacctctcggtctggttgaggaagctgctaagacggctcctggaaagaagagaccggtagaaccgtcacctcagcgttcccccgactcctccacgggcatcggcaagaaaggccagcagcccgctagaaagagactgaactttgggcagactggcgactcagagtcagtccccgaccctcaaccaatcggagaaccaccagcaggcccctctggtctgggatctggtacaatggctgcaggcggtggcgctccaatggcagacaataacgaaggcgccgacggagtgggtaatgcctcaggaaattggcattgcgattccacatggctgggcgacagagtcatcaccaccagcacccgaacctgggctttgcccacctacaacaaccacctctacaagcaaatctccagtcagtcagcaggtagcaccaacgacaacgtctacttcggctacagcaccccctgggggtattttgacttcaacagattccactgtcacttctcaccacgtgactggcagcggctcatcaacaacaactggggattccggcccaagaagctcaacttcaagctgttcaacatccaggtcaaggaggtcacaacgaatgacggcgtcacgaccatcgccaataaccttaccagcacggttcaggtcttttcggactcggaataccagctgccctacgtcctcggctccgcacaccagggctgcctgcctccgttcccggcggacgtcttcatgattccccagtacggctacctgactctgaacaatggcagccaatcggtgggtcgttcctctttctactgcctggaatatttcccttctcaaatgctgagaacgggcaacaacttcaccttcagctacaccttcgaggacgttcccttccacagcagctacgcacacagccagagcctggaccggctgatgaatcctcttatcgaccagtacctgtattacctggccagaacacagagcaacgcaggaggcacagctggcaatcgggaactgcagttttatcagggcgggcctaccaccatggccgaacaagccaaaaactggctgcctggaccttgcttccggcaacaaagagtctccaagacgctggatcaaaacaacaacagcaactttgcttggactggtgccaccaaataccatctaaatggaagaaattcattggttaatcccggtgtcgccatggcaacccacaaggacgacgaggaacgcttcttcccttcgagcggagtcctgatttttggaaaaactggagcagctaataagactacactggaaaatgtgttaatgacaaatgaagaggaaattcgtcctaccaacccggtagccaccgaggaatacgggactgttagcagcaacctgcaggcggctaacactgcagcccagacacaagttgtcaacaaccagggagccttacctggtatggtctggcagaaccgggacgtgtacctgcagggtcccatctgggccaagattcctcacacggacggcaactttcacccgtctccgctgatgggcggctttggactgaagcatccgcctcctcagatcctgatcaaaaacactcctgttcctgctaatcccccggaggtgtttacgcctgccaagtttgcttctttcatcacacagtacagcaccggccaggtcagcgtggagatcgagtgggagctgcagaaggagaacagcaagcgctggaacccagagattcagtatacctccaattttgacaaacagactggtgtggactttgccgttgacagccagggtgtttattctgagcctcgccccattggtactcgttacctcacccgtaatctgtaa

SEQ ID NO: 503 - protein, 737 aa, Artificial Sequence; identical to SEQ ID NO: 462
  Description of Artificial Sequence: Synthetic polypeptide

SEQ ID NO: 504 - protein, 737 aa, Artificial Sequence
  Description of Artificial Sequence: Synthetic polypeptide
MAADGYLPDWLEDNLSEGIREWWDLKPGAPKPKANQQKQDDGRGLVLPGYKYLGPFNGLDKGEPVNAADAAALEHDKAYDQQLKAGDNPYLRYNHADAEFQERLQEDTSFGGNLGRAVLQAKKRVLEPLGLVEEAAKTAPGKKRPVEPSPQRSPDSSTGIGKKGQQPARKRLNFGQTGDSESVPDPQPIGEPPAGPSGLGSGTMAAGGGAPMADNNEGADGVGNASGNWHCDSTWLGDRVITTSTRTWALPTYNNHLYKQISSQSAGSTNDNVYFGYSTPWGYFDFNRFHCHFSPRDWQRLINNNWGFRPKKLNFKLFNIQVKEVTTNDGVTTIANNLTSTVQVFSDSEYQLPYVLGSAHQGCLPPFPADVFMIPQYGYLTLNNGSQSVGRSSFYCLEYFPSQMLRTGNNFTFSYTFEDVPFHSSYAHSQSLDRLMNPLIDQYLYYLARTQSNAGGTAGNRELQFYQGGPTTMAEQAKNWLPGPCFRQQRVSKTLDQNNNSNFAWTGATKYHLNGRNSLVNPGVAMATHKDDEERFFPSSGVLIFGKTGAANKTTLENVLMTNEEEIRPTNPVATEEYGTVSSNLQAANTAAQTQVVNNQGALPGMVWQNRDVYLQGPIWAKIPHTDGNFHPSPLMGGFGLKHPPPQILIKNTPVPANPPEVFTPAKFASFITQYSTGQVSVEIEWELQKENSKRWNPEIQYTSNFDKQTGVDFAVDSQGVYSEPRPIGTRYLTRNL

SEQ ID NO: 505 - DNA, 2217 bp, Artificial Sequence
  Description of Artificial Sequence: Synthetic polynucleotide
atggctgccgatggttatcttccagattggctcgaggacaacctctctgagggcattcgcgagtggtgggacctgaaacctggagccccgaaacccaaagccaaccagcaaaagcaggacgacggccggggtctggtgcttcctggctacaagtacctcggacccttcaacggactcgacaagggggagcccgtcaacgcggcggacgcagcggccctcgagcacgacaaggcctacgaccagcagctcaaagcgggtgacaatccgtacctgcggtataatcacgccgacgccgagtttcaggagcgtctgcaagaagatacgtcttttgggggcaacctcgggcgagcagtcttccaggccaagaagcgggttctcgaacctctcggtctggttgaggaaggcgctaagacggctcctggaaagaagagaccggtagagccgtcaccacagcgttcccccgactcctccacgggcatcggcaagaaaggccagcagcccgccagaaagagactcaatttcggtcagactggcgactcagagtcagtccccgaccctcaacctatcggagaacctccagcagcgccctctagtgtgggatctggtacaatggctgcaggcggtggcgcaccaatggcagacaataacgaaggtgccgacggagtgggtagttcctcgggaaattggcattgcgattccacatggctgggcgacagagtcatcaccaccagcacccgaacctgggccctgcccacctacaacaaccacctctacaagcaaatctccaacgggacctcgggaggcagcaccaacgacaacacctactttggctacagcaccccctgggggtattttgactttaacagattccactgccacttctcaccacgtgactggcagcgactcatcaacaacaactggggattccggcccaagagactcagcttcaagctcttcaacatccaggtcaaagaggtcacgcagaatgaaggcaccaagaccatcgccaataacctcaccagcaccatccaggtgtttacggactcggaataccagctgccgtacgtcctcggctctgcccaccagggctgcctgcctccgttcccggcggacgtcttcatgattcctcagtacggctacctgactctcaacaacggtagtcaggccgtgggacgttcctccttctactgcctggagtacttcccctctcagatgctgagaacgggcaacaacttttccttcagctacactttcgaggacgtgcctttccacagcagctacgcgcacagccagagtttggacaggctgatgaatcctctcatcgaccagtacctgtactacctgtcaagaacccagtctacgggaggcacagcgggaacccagcagttgctgttttctcaggccgggcctagcaacatgtcggctcaggccagaaactggctgcctggaccctgctacagacagcagcgcgtctccacgacactgtcgcaaaacaacaacagcaactttgcctggactggtgccaccaagtatcatctgaacggcagagactctctggtgaatccgggcgtcgccatggcaaccaacaaggacgacgaggaccgcttcttcccacccagcggcatcctcatgtttggcaagcagggagctggaaaagacaacgtggactatagcaacgtgatgctaaccagcgaggaagaaatcaagaccaccaaccccgtggccacagaacagtatggcgtggtggctgataacctacagcagcaaaacaccgctcctattgtgggggccgtcaacagccagggagccttacctggcatggtctggcagaaccgggacgtgtacctgcagggtcctatttgggccaagattcctcacacagatggcaactttcacccgtctcctttaatgggcggctttggacttaaacatccgcctcctcagatcctcatcaaaaacactcctgttcctgcggatcctccaacagcgttcaaccaggccaagctgaattctttcatcacgcagtacagcaccggacaagtcagcgtggtgatcgagtgggagctgcagaaggagaacagcaagcgctggaacccagagattcagtatacttccaactactacaaatctacaaatgtggactttgctgttaatactgagggtgtttactctgagcttcgccccattggcactcgttacctcacccgtaatctgtaa

SEQ ID NO: 506 - protein, 738 aa, Artificial Sequence
  Description of Artificial Sequence: Synthetic polypeptide
MAADGYLPDWLEDNLSEGIREWWDLKPGAPKPKANQQKQDDGRGLVLPGYKYLGPFNGLDKGEPVNAADAAALEHDKAYDQQLKAGDNPYLRYNHADAEFQERLQEDTSFGGNLGRAVFQAKKRVLEPLGLVEEGAKTAPGKKRPVEPSPQRSPDSSTGIGKKGQQPARKRLNFGQTGDSESVPDPQPIGEPPAAPSSVGSGTMAAGGGAPMADNNEGADGVGSSSGNWHCDSTWLGDRVITTSTRTWALPTYNNHLYKQISNGTSGGSTNDNTYFGYSTPWGYFDFNRFHCHFSPRDWQRLINNNWGFRPKRLSFKLFNIQVKEVTQNEGTKTIANNLTSTIQVFTDSEYQLPYVLGSAHQGCLPPFPADVFMIPQYGYLTLNNGSQAVGRSSFYCLEYFPSQMLRTGNNFSFSYTFEDVPFHSSYAHSQSLDRLMNPLIDQYLYYLSRTQSTGGTAGTQQLLFSQAGPSNMSAQARNWLPGPCYRQQRVSTTLSQNNNSNFAWTGATKYHLNGRDSLVNPGVAMATNKDDEDRFFPPSGILMFGKQGAGKDNVDYSNVMLTSEEEIKTTNPVATEQYGVVADNLQQQNTAPIVGAVNSQGALPGMVWQNRDVYLQGPIWAKIPHTDGNFHPSPLMGGFGLKHPPPQILIKNTPVPADPPTAFNQAKLNSFITQYSTGQVSVVIEWELQKENSKRWNPEIQYTSNYYKSTNVDFAVNTEGVYSELRPIGTRYLTRNL

SEQ ID NO: 507 - DNA, 2214 bp, Artificial Sequence
  Description of Artificial Sequence: Synthetic polynucleotide
atggctgctgacggttatcttccagattggctcgaggacaacctctctgagggcattcgcgagtggtgggacctgaaacctggagcccccaagcccaaggccaaccagcagaagcaggacgacggccggggtctggtgcttcctggctacaagtacctcggacccttcaacggactcgacaagggggagcccgtcaacgcggcggacgcagcggccctcgagcacgacaaggcctacgaccagcagctcaaagcgggtgacaatccgtacctgcggtataaccacgccgacgccgagtttcaggagcgtctgcaagaagatacgtcttttgggggcaacctcgggcgagcagtcttccaggccaagaagcgggttctcgaacctctcggtctggttgaggaagctgctaagacggctcctggaaagaagagaccggtagaaccgtcacctcagcgttcccccgactcctccacgggcatcggcaagaaaggccagcagcccgctagaaagagactgaactttgggcagactggcgactcagagtcagtccccgaccctcaaccaatcggagaaccaccagcaggcccctctggtctgggatctggtacaatggctgcaggcggtggcgccccaatggcagacaataacgaaggcgccgacggagtgggtaatgcctcaggaaattggcattgcgattccacatggctgggcgacagagtcatcaccaccagcacccgaacctgggctttgcccacctacaacaaccacctctacaagcaaatctccagtcagtcagcaggtagcaccaacgacaacgtctacttcggctacagcaccccctgggggtattttgacttcaacagattccactgtcacttctcaccacgtgactggcagcggctcatcaacaacaactggggattccggcccaagaagctcaacttcaagctgttcaacatccaggtcaaggaggtcacaacgaatgacggcgtcacgaccatcgccaataaccttaccagcacggttcaggtcttttcggactcggaataccagctgccctacgtcctcggctccgcacaccagggctgcctgcctccgttcccggcggacgtcttcatgattccccagtacggctacctgactctgaacaatggcagccaatcggtgggtcgttcctctttctactgcctggaatatttcccttctcaaatgctgagaacgggcaacaacttcaccatcagctacaccttcgaggacgttcccttccacagcagctacgcacacagccagagcctggaccggctgatgaatcctcttatcgaccagtacctgtattacctggccagaacacagagcaacgcaggaggcacagctggcaatcaggaactgcagttttatcagggcgggcctaccaccatggccgaacaagccaaaaactggctgcctggaccttgcttccggcaacaaagagtctccaagacgctggatcaaaacaacaacagcaactttgcttggactggtgccaccaaataccatctaaatggaagaaattcattggttaatcccggtgtcgccatggcaacccacaaggacgacgaggaacgcttcttcccttcgagcggagtcctgatttttggaaaaactggagcagctaataagactacactggaaaatgtgttaatgacaaatgaagaggaaattcgtcctaccaacccggtagccaccgaggaatacgggactgttagcagcaacctgcaggcggctaacactgcagcccagacacaagttgtcaacaaccagggagccttacctggtatggtctggcagaaccgggacgtgtacctgcagggtcccatctgggccaagattcctcacacagatggcaactttcacccgtctcctttaatgggcggctttggacttaaacatccgcctcctcagatcctcatcaaaaacactcctgttcctgcggatcctccaacagcgttcaaccaggccaagctgaattctttcatcacgcagtacagcaccggacaagtcagcgtggagatcgagtgggagctgcagaaggagaacagcaagcgctggaacccagagattcagtatacttccaactactacaaatctacaaatgtggactttgctgttaatactgagggtgtttactctgagcctcgccccattggcactcgttacctcacccgtaatctgtaa

SEQ ID NO: 508 - protein, 737 aa, Artificial Sequence
  Description of Artificial Sequence: Synthetic polypeptide
MAADGYLPDWLEDNLSEGIREWWDLKPGAPKPKANQQKQDDGRGLVLPGYKYLGPFNGLDKGEPVNAADAAALEHDKAYDQQLKAGDNPYLRYNHADAEFQERLQEDTSFGGNLGRAVFQAKKRVLEPLGLVEEAAKTAPGKKRPVEPSPQRSPDSSTGIGKKGQQPARKRLNFGQTGDSESVPDPQPIGEPPAGPSGLGSGTMAAGGGAPMADNNEGADGVGNASGNWHCDSTWLGDRVITTSTRTWALPTYNNHLYKQISSQSAGSTNDNVYFGYSTPWGYFDFNRFHCHFSPRDWQRLINNNWGFRPKKLNFKLFNIQVKEVTTNDGVTTIANNLTSTVQVFSDSEYQLPYVLGSAHQGCLPPFPADVFMIPQYGYLTLNNGSQSVGRSSFYCLEYFPSQMLRTGNNFTISYTFEDVPFHSSYAHSQSLDRLMNPLIDQYLYYLARTQSNAGGTAGNQELQFYQGGPTTMAEQAKNWLPGPCFRQQRVSKTLDQNNNSNFAWTGATKYHLNGRNSLVNPGVAMATHKDDEERFFPSSGVLIFGKTGAANKTTLENVLMTNEEEIRPTNPVATEEYGTVSSNLQAANTAAQTQVVNNQGALPGMVWQNRDVYLQGPIWAKIPHTDGNFHPSPLMGGFGLKHPPPQILIKNTPVPADPPTAFNQAKLNSFITQYSTGQVSVEIEWELQKENSKRWNPEIQYTSNYYKSTNVDFAVNTEGVYSEPRPIGTRYLTRNL

SEQ ID NO: 509 - DNA, 2217 bp, Artificial Sequence
  Description of Artificial Sequence: Synthetic polynucleotide
atggctgccgatggttatcttccagattggctcgaggacaacctctctgagggcattcgcgagtggtgggacctgaaacctggagccccgaaacccaaagccaaccagcaaaagcaggacgacggccggggtctggtgcttcctggctacaagtacctcggacccttcaacggactcgacaagggggagcccgtcaacgcggcggacgcagcggccctcgagcacgacaaggcctacgaccagcagctcaaagcgggtgacaatccgtacctgcggtataatcacgccgacgccgagtttcaggagcgtctgcaagaagatacgtcttttgggggcaacctcgggcgagcagtcttccaggccaagaagcgggttctcgaacctctcggtctggttgaggaaggcgctaagacggctcctggaaagaagagaccggtagagccgtcaccacagcgttcccccgactcctccacgggcatcggcaagaaaggccagcagcccgccagaaagagactcaatttcggtcagactggcgactcagagtcagtccccgaccctcaacctatcggagaacctccagcagcgccctctagtgtgggatctggtacaatggctgcaggcggtggcgcaccaatggcagacaataacgaaggtgccgacggagtgggtagttcctcgggaaattggcattgcgattccacatggctgggcgacagagtcatcaccaccagcacccgaacctgggccctgcccgcctacaacaaccacctctacaagcaaatctccaacgggacctcgggaggcagcaccaacgacaacacctactttggctacagcaccccctgggggtattttgactttaacagattccactgccacttctcaccacgtgactggcagcgactcatcaacaacaactggggattccggcccaagagactcagcttcaagctcttcaacatccaggtcaaagaggtcacgcagaatgaaggcaccaagaccatcgccaataacctcaccagcaccatccaggtgtttacggactcggaataccagctgccgtacgtcctcggctctgcccaccagggctgcctgcctccgttcccggcggatgtcttcatgattcctcagtacggctacctgactctcaacaacggtagtcaggccgtgggacgttcctccttctactgcctggagtacttcccctctcagatgctgagaacgggcaacaacttttccttcagctacactttcgaggacgtgcctttccacagcagctacgcgcacagccagagtttggacaggctgatgaatcctctcatcgaccagtacctgtactacctgtcaagaacccagtctacgggaggcacagcgggaacccagcagttgctgttttctcaggccgggcctagcaacatgtcggctcaggccagaaactggctgcctggaccctgctacagacagcagcgcgtctccacgacactgtcgcaaaacaacaacagcaactttgcctggactggtgccaccaagtatcatctgagcggcagagactctctggtgaatccgggcgtcgccatggcaaccaacaaggacgacgaggaccgcttcttcccatccagcggcatcctcatgtttggcaagcagggagctggaaaagacaacgtggactatagcaacgtgatgctaaccagcgaggaagaaatcaagaccaccaaccccgtggccacagaacagtatggcgtggtggctgataacctacagcagcaaaacaccgctcctattgtgggggccgtcaacagccagggagccttacctggcatggtctggcagaaccgggacgtgtacctgcagggtcctatttgggccaagattcctcacacagatggcaactttcacccgtctcctttaatgggcggctttggacttaaacatccgcctcctcagatcctcatcaaaaacactcctgttcctgcggatcctccaacagcgttcaaccaggccaagctgaattcttccatcacgcagtacagcaccggacaagtcagcgtggagatcgagtgggagctgcagaaggagaacagcaagcgctggaacccagagattcagtatacttccaactactacaaatctacaaatgtggactttgctgttaatactgagggtgtttactctgagcctcgccccattggcactcgttacctcacccgtaatttgtaa

SEQ ID NO: 510 - protein, 738 aa, Artificial Sequence
  Description of Artificial Sequence: Synthetic polypeptide
MAADGYLPDWLEDNLSEGIREWWDLKPGAPKPKANQQKQDDGRGLVLPGYKYLGPFNGLDKGEPVNAADAAALEHDKAYDQQLKAGDNPYLRYNHADAEFQERLQEDTSFGGNLGRAVFQAKKRVLEPLGLVEEGAKTAPGKKRPVEPSPQRSPDSSTGIGKKGQQPARKRLNFGQTGDSESVPDPQPIGEPPAAPSSVGSGTMAAGGGAPMADNNEGADGVGSSSGNWHCDSTWLGDRVITTSTRTWALPAYNNHLYKQISNGTSGGSTNDNTYFGYSTPWGYFDFNRFHCHFSPRDWQRLINNNWGFRPKRLSFKLFNIQVKEVTQNEGTKTIANNLTSTIQVFTDSEYQLPYVLGSAHQGCLPPFPADVFMIPQYGYLTLNNGSQAVGRSSFYCLEYFPSQMLRTGNNFSFSYTFEDVPFHSSYAHSQSLDRLMNPLIDQYLYYLSRTQSTGGTAGTQQLLFSQAGPSNMSAQARNWLPGPCYRQQRVSTTLSQNNNSNFAWTGATKYHLSGRDSLVNPGVAMATNKDDEDRFFPSSGILMFGKQGAGKDNVDYSNVMLTSEEEIKTTNPVATEQYGVVADNLQQQNTAPIVGAVNSQGALPGMVWQNRDVYLQGPIWAKIPHTDGNFHPSPLMGGFGLKHPPPQILIKNTPVPADPPTAFNQAKLNSSITQYSTGQVSVEIEWELQKENSKRWNPEIQYTSNYYKSTNVDFAVNTEGVYSEPRPIGTRYLTRNL

SEQ ID NO: 511 - protein, 736 aa, Artificial Sequence; identical to SEQ ID NO: 11
  Description of Artificial Sequence: Synthetic polypeptide

SEQ ID NO: 512 - DNA, 2217 bp, Artificial Sequence
  Description of Artificial Sequence: Synthetic polynucleotide
atggctgctgacggttatcttccagattggctcgaggacaacctctctgagggcattcgcgagtggtgggacctgaaacctggagcccccaagcccaaggccaaccagcagaagcaggacgacggccggggtctggtgcttcctggctacaagtacctcggacccttcaacggactcgacaagggggagcccgtcaacgcggcggacgcagcggccctcgagcacgacaaggcctacgaccagcagctcaaagcgggtgacaatccgtacctgcggtataaccacgccgacgccgagtttcaggagcgtctgcaagaagatacgtcttttgggggcaacctcgggcgagcagtcttccaggccaagaagcgggttctcgaacctctcggtctggttgaggaagctgctaagacggctcctggaaagaagagaccggtagaaccgtcacctcagcgttcccccgactcctccacgggcatcggcaagaaaggccagcagcccgctaaaaagagactgaactttggtcagactggcgactcagagtcagtccccgaccctcaaccaatcggagaaccaccagcaggcccctctggtctgggatctggtacaatggctgcaggcggtggcgctccaatggcagacaataacgaaggcgccgacggagtgggtagttcctcaggaaattggcattgcgattccacatggctgggcgacagagtcatcaccaccagcacccgaacctgggccctgcccacctacaacaaccacctctacaagcaaatatccaatgggacatcgggaggaagcaccaacgacaacacctacttcggctacagcaccccctgggggtattttgacttcaacagattccactgccacttctcaccacgtgactggcagcgactcatcaacaacaactggggattccggccaaaaagactcagcttcaagctcttcaacatccaggtcaaggaggtcacgcagaatgaaggcaccaagaccatcgccaataaccttaccagcacgattcaggtatttacggactcggaataccagctgccgtacgtcctcggctccgcgcaccagggctgcctgcctccgttcccggcggacgtcttcatgattccccagtacggctaccttacactgaacaatggaagtcaagccgtaggccgttcctccttctactgcctggaatattttccatctcaaatgctgcgaactggaaacaattttgaattcagctacaccttcgaggacgtgcctttccacagcagctacgcacacagccagagcttggaccgactgatgaatcctctcatcgaccagtacctgtactacttatccagaactcagtccacaggaggaactcaaggtacccagcaattgttattttctcaagctgggcctgcaaacatgtcggctcaggctaagaactggctacctggaccttgctaccggcagcagcgagtctctacgacactgtcgcaaaacaacaacagcaactttgcttggactggtgccaccaaatatcacctgaacggaagagactctttggtaaatcccggtgtcgccatggcaacccacaaggacgacgaggaacgcttcttcccgtcgagtggagtcctgatgtttggaaaacagggtgctggaagagacaatgtggactacagcagcgttatgctaaccagcgaagaagaaattaaaaccactaaccctgtagccacagaacaatacggtgtggtggctgacaacttgcagcaaaccaatacagggcctattgtgggaaatgtcaacagccaaggagccttacctggcatggtctggcagaaccgagacgtgtacctgcagggtcccatctgggccaagattcctcacacggacggcaacttccacccttcaccgctaatgggaggatttggactgaagcacccacctcctcagatcctgatcaagaacacgccggtacctgcggatcctccaacaacgttcagccaggcgaaattggcttccttcattacgcagtacagcaccggacaggtcagcgtggaaatcgagtgggagctgcagaaggagaacagcaaacgctggaacccagagattcagtacacttcaaactactacaaatctacaaatgtggactttgctgtcaatacagagggaacttattctgagcctcgccccattggtactcgttacctcacccgtaatctgtaa

SEQ ID NO: 513 - protein, 738 aa, Artificial Sequence
  Description of Artificial Sequence: Synthetic polypeptide
MAADGYLPDWLEDNLSEGIREWWDLKPGAPKPKANQQKQDDGRGLVLPGYKYLGPFNGLDKGEPVNAADAAALEHDKAYDQQLKAGDNPYLRYNHADAEFQERLQEDTSFGGNLGRAVFQAKKRVLEPLGLVEEGAKTAPGKKRPVEPSPQRSPDSSTGIGKKGQQPARKRLNFGQTGDSESVPDPQPLGEPPAAPSSVGSGTMAAGGGAPMADNNEGADGVGSSSGNWHCDSTWLGDRVITTSTRTWALPTYNNHLYKQISNGTSGGSTNDNTYFGYSTPWGYFDFNRFHCHFSPRDWQRLINNNWGFRPKRLSFKLFNIQVKEVTQNEGTKTIANNLTSTIQVFTDSEYQLPYVLGSAHQGCLPPFPADVFMIPQYGYLTLNNGSQAVGRSSFYCLEYFPSQMLRTGNNFSFSYTFEDVPFHSSYAHSQSLDRLMNPLIDQYLYYLSRTQSTGGTAGTQQLLFSQAGPSNMSAQARNWLPGPCYRQQRVSTTLSQNNNSNFAWTGATKYHLNGRDSLVNPGVAMATNKDDEDRFFPSSGILMFGKQGAGKDNVDYSNVMLTSEEEIKTTNPVATEQYGVVADNLQRQNTAPIVGAVNSQGALPGMVWQNRDVYLQGPIWAKIPHTDGNFHPSPLMGGFGLKHPPPQILIKNTPVPADPPTAFNQAKLNSFITQYSTGQVSVEIEWELQKENSKRWNPEIQYTSNYYKSTNVDFAVNTEGVYSEPRPIGTRYLTRNL

SEQ ID NO: 514 - protein, 736 aa, Artificial Sequence
  Description of Artificial Sequence: Synthetic polypeptide
MAADGYLPDWLEDNLSEGIREWLNLKPGAPQPKANQQKQDNARGLVLPGYKYLGPFNGLDKGDPVNEADAAALEHDKAYGQQLKAGDNPYLKYNHADAEFQERLQKDTSFGGNLGKAVFQAKKRILEPLGLVETPAKTAPGKKRPVDPSPQRSPDSSSGIGKKSPHPARKRLNFGQTGEAESVPDPQPIGEPPSDPSSVGSGTMAAGGGAPMADNNEGADGVGNSSGNWHCDSTWLGDRVITTSTRTWALPTYNNHLYKQISSQSGATNDNHYFGYSTPWGYFDFNRFHCHFSPRDWQRLINNNWGFRPKRLSFKLFNIQVKEVTQNDGTTTIANNLTSTVQVFTDSEYQLPYVLGSAHQGCLPPFPADVFMIPQYGYLTLNNGSQAVGRSSFYCLEYFPSQMLRTGNNFQFSYTFEDVPFHSSYAHSQSLDRLMNPLIDQYLYYLSKTQGTNATVQGAKLQFSQAGPSNMRDQARNWLPGPCYRQQRVSKTANDNNNSEYAWTGATKYHLNGRDSLVNPGPAMASHKDDEEKFFPMNGTLVFGKNGAGNSNVDIENVMITDEEEIRTTNPVATEQYGVVSDNLQSSNTRPITGDVDSQGVLPGMVWQDRDVYLQGPIWAKIPHTDGHFHPSPLMGGFGLKHPPPQILIKNTPVPANPATTFTPGKFASFITQYSTGQVSVQIEWELQKENSKRWNPEIQYTSNYNKSVNVDFTVDTNGVYSEPRPIGTRYLTRNL

SEQ ID NO: 515 - protein, 736 aa, Artificial Sequence; identical to SEQ ID NO: 90
  Description of Artificial Sequence: Synthetic polypeptide

SEQ ID NO: 516 - protein, 736 aa, Artificial Sequence
  Description of Artificial Sequence: Synthetic polypeptide
MAADGYLPDWLEDNLSEGIREWWDLKPGAPKPKANQQKQDDGRGLVLPGYKYLGPFNGLDKGEPVNAADAAALEHDKAYDQQLKAGDNPYLRYNHADAEFQERLQEDTSFGGNLGRAVFQAKKRVLEPLGLVEEGAKTAPGKKRPVEQSPQEPDSSSGIGKTGQQPAKKRLNFGQTGDSESVPDPQPLGEPPAAPSGLGPNTMASGGGAPMADNNEGADGVGNSSGNWHCDSTWLGDRVITTSTRTWALPTYNNHLYKQISNGTSGGSTNDNTYFGYSTPWGYFDFNRFHCHFSPRDWQRLINNNWGFRPKRLNFKLFNIQVKEVTTNEGTKTIANNLTSTVQVFTDSEYQLPYVLGSAHQGCLPPFPADVFMVPQYGYLTLNNGSQALGRSSFYCLEYFPSQMLRTGNNFQFSYTFEDVPFHSSYAHSQSLDRLMNPLIDQYLYYLVRTQTTGTGGTQTLAFSQAGPSSMANQARNWVPGPCYRQQRVSTTTNQNNNSNFAWTGAAKFKLNGRDSLMNPGVAMASHKDDEDRFFPSSGVLIFGKQGAGNDGVDYSQVLITDEEEIKATNPVATEEYGAVAINNQAANTQAQTGLVHNQGVIPGMVWQNRDVYLQGPIWAKIPHTDGNFHPSPLMGGFGLKHPPPQILIKNTPVPADPPLTFNQAKLNSFITQYSTGQVSVEIEWELQKENSKRWNPEIQYTSNYYKSTNVDFAVNTEGVYSEPRPIGTRYLTRNL

SEQ ID NO: 517 - protein, 736 aa, Artificial Sequence; identical to SEQ ID NO: 516
  Description of Artificial Sequence: Synthetic polypeptide

SEQ ID NO: 518 - protein, 736 aa, Artificial Sequence
  Description of Artificial Sequence: Synthetic polypeptide
MAADGYLPDWLEDNLSEGIREWWDLKPGAPKPKANQQKQDDGRGLVLPGYKYLGPFNGLDKGEPVNAADAAALEHDKAYDQQLKAGDNPYLRYNHADAEFQERLQEDTSFGGNLGRAVFQAKKRVLEPLGLVEEGAKTAPGKKRPVEQSPQEPDSSSGIGKTGQQPAKKRLNFGQTGDSESVPDPQPLGEPPAAPSGLGPNTMASGGGAPMADNNEGADGVGNSSGNWHCDSTWLGDRVITTSTRTWALPTYNNHLYKQISNGTSGGSTNDNTYFGYSTPWGYFDFNRFHCHFSPRDWQRLINNNWGFRPKRLNFKLFNIQVKEVTTNEGTKTIANNLTSTVQVFTDSEYQLPYVLGSAHQGCLPPFPADVFMVPQYGYLTLNNGSQALGRSSFYCLEYFPSQMLRTGNNFQFSYTFEDVPFHSSYAHSQSLDRLMNPLIDQYLYYLVRTQTTGTGGTQTLAFSQAGPSSMANQARNWVPGPCYRQQRVSTTTNQNNNSNFAWTGAAKFKLNGRDSLMNPGVAMASHKDDEDRFFPSSGVLIFGKQGAGNDGVDYSQVLITDEEEIKATNPVATEEYGAVAINNQRANTQAQTGLVHNQGVIPGMVWQNRDVYLQGPIWAKIPHTDGNFHPSPLMGGFGLKHPPPQILIKNTPVPADPPLTFNQAKLNSFITQYSTGQVSVEIEWELQKENSKRWNPEIQYTSNYYKSTNVDFAVNTEGVYSEPRPIGTRYLTRNL

SEQ ID NO: 519 - protein, 736 aa, Artificial Sequence
  Description of Artificial Sequence: Synthetic polypeptide
MAADGYLPDWLEDNLSEGIREWWDLKPGAPKPKANQQKQDDGRGLVLPGYKYLGPFNGLDKGEPVNAADAAALEHDKAYDQQLKAGDNPYLRYNHADAEFQERLQEDTSFGGNLGRAVFQAKKRVLEPLGLVEEGAKTAPGKKRPVEQSPQEPDSSSGIGKTGQQPAKKRLNFGQTGDSESVPDPQPLGEPPAAPSGLGPNTMASGGGAPMADNNEGADGVGNSSGNWHCDSTWLGDRVITTSTRTWALPTYNNHLYKQISNGTSGGSTNDNTYFGYSTPWGYFDFNRFHCHFSPRDWQRLINNNWGFRPKRLNFKLFNIQVKEVTTNEGTKTIANNLTSTVQVFTDSEYQLPYVLGSAHQGCLPPFPADVFMVPQYGYLTLNNGSQALGRSSFYCLEYFPSQMLRTGNNFQFSYTFEDVPFHSSYAHSQSLDRLMNPLIDQYLYYLVRTQTTGTGGTQTLAFSQAGPSSMANQARNWVPGPCYRQQRVSTTTNQNNNSNFAWTGAAKFKLNGRDSLMNPGVAMASHKDDEDAFFPSSGVLIFGKQGAGNDGVDYSQVLITDEEEIKATNPVATEEYGAVAINNQAANTQAQTGLVHNQGVIPGMVWQNRDVYLQGPIWAKIPHTDGNFHPSPLMGGFGLKHPPPQILIKNTPVPADPPLTFNQAKLNSFITQYSTGQVSVEIEWELQKENSKRWNPEIQYTSNYYKSTNVDFAVNTEGVYSEPRPIGTRYLTRNL

SEQ ID NO: 520 - DNA, 1803 bp, Bovine Adeno-associated Virus
acggcgcctgcggcaaaaaagaggcctctagagcagagtcctcaagagccagactcctcgagcggagttggcaagaaaggcaaacagcctgccagaaagagactcaactttgacgacgaacctggagccggagacgggcctcccccagaaggaccatcttccggagctatgtctactgagactgaaatgcgtgcagcagctggcggaaatggtggcgatgcgggacaaggtgccgagggagtgggtaatgcctccggtgattggcattgcgattccacttggtcagagagccacgtcaccaccacctcaacccgcacctgggtcctgccgacctacaacaaccacctgtacctgcggctcggctcgagcaacgccagcgacaccttcaacggattctccaccccctggggatactttgactttaaccgcttccactgccacttctcgccaagagactggcaaaggctcatcaacaaccactggggactgcgccccaaaagcatgcaagtccgcatcttcaacatccaagttaaggaggtcacgacgtctaacggggagacgaccgtatccaacaacctcaccagcacggtccagatctttgcggacagcacgtacgagctcccgtacgtgatggatgcaggtcaggagggcagcttgcctcctttccccaacgacgtgttcatggtgcctcagtacgggtactgcggactggtaaccggaggcagctctcaaaaccagacagacagaaatgccttctactgtctggagtactttcccagccagatgctgagaaccggaaacaactttgagatggtgtacaagtttgaaaacgtgcccttccactccatgtacgctcacagccagagcctggataggctgatgaacccgctgctggaccagtacctgtgggagctccagtctaccacctctggaggaactctcaaccagggcaattcagccaccaactttgccaagctgaccaaaacaaacttttctggctaccgcaaaaactggctcccggggcccatgatgaagcagcagagattctccaagactgccagtcaaaactacaagattccccagggaagaaacaacagtctgctccattatgagaccagaactaccctcgacggaagatggagcaattttgccccgggaacggccatggcaaccgcagccaacgacgccaccgacttctctcaggcccagctcatctttgcggggcccaacatcaccggcaacaccaccacagatgccaataacctgatgttcacttcagaagatgaacttagggccaccaacccccgggacactgacctgtttggccacctggcaaccaaccagcaaaacgccaccaccgttcctaccgtagacgacgtggacggagtcggcgtgtacccgggaatggtgtggcaggacagagacatttactaccaagggcccatttgggccaaaattccacacacggatggacactttcacccgtctcctctcattggcggatttggactgaaaagcccgcctccacaaatattcatcaaaaacactcctgtacccgccaatcccgcaacgaccttctctccggccagaatcaacagcttcatcacccagtacagcaccggacaggtggctgtcaaaatagaatgggaaatccagaaggagcggtccaagagatggaacccagaggtccagttcacgtccaactacggagcacaggactcgcttctctgggctcccgacaacgccggagcctacaaagagcccagggccattggatcccgatacctcaccaaccacctctag

SEQ ID NO: 521 - DNA, 1617 bp, Bovine Adeno-associated Virus
atgcgtgcagcagctggcggaaatggtggcgatgcgggacaaggtgccgagggagtgggtaatgcctccggtgattggcattgcgattccacttggtcagagagccacgtcaccaccacctcaacccgcacctgggtcctgccgacctacaacaaccacctgtacctgcggctcggctcgagcaacgccagcgacaccttcaacggattctccaccccctggggatactttgactttaaccgcttccactgccacttctcgccaagagactggcaaaggctcatcaacaaccactggggactgcgccccaaaagcatgcaagtccgcatcttcaacatccaagttaaggaggtcacgacgtctaacggggagacgaccgtatccaacaacctcaccagcacggtccagatctttgcggacagcacgtacgagctcccgtacgtgatggatgcaggtcaggagggcagcttgcctcctttccccaacgacgtgttcatggtgcctcagtacgggtactgcggactggtaaccggaggcagctctcaaaaccagacagacagaaatgccttctactgtctggagtactttcccagccagatgctgagaaccggaaacaactttgagatggtgtacaagtttgaaaacgtgcccttccactccatgtacgctcacagccagagcctggataggctgatgaacccgctgctggaccagtacctgtgggagctccagtctaccacctctggaggaactctcaaccagggcaattcagccaccaactttgccaagctgaccaaaacaaacttttctggctaccgcaaaaactggctcccggggcccatgatgaagcagcagagattctccaagactgccagtcaaaactacaagattccccagggaagaaacaacagtctgctccattatgagaccagaactaccctcgacggaagatggagcaattttgccccgggaacggccatggcaaccgcagccaacgacgccaccgacttctctcaggcccagctcatctttgcggggcccaacatcaccggcaacaccaccacagatgccaataacctgatgttcacttcagaagatgaacttagggccaccaacccccgggacactgacctgtttggccacctggcaaccaaccagcaaaacgccaccaccgttcctaccgtagacgacgtggacggagtcggcgtgtacccgggaatggtgtggcaggacagagacatttactaccaagggcccatttgggccaaaattccacacacggatggacactttcacccgtctcctctcattggcggatttggactgaaaagcccgcctccacaaatattcatcaaaaacactcctgtacccgccaatcccgcaacgaccttctctccggccagaatcaacagcttcatcacccagtacagcaccggacaggtggctgtcaaaatagaatgggaaatccagaaggagcggtccaagagatggaacccagaggtccagttcacgtccaactacggagcacaggactcgcttctctgggctcccgacaacgccggagcctacaaagagcccagggccattggatcccgatacctcaccaaccacctctag

SEQ ID NO: 522 - DNA, 1173 bp, Bovine Adeno-associated Virus
atggcgctggtaagctggctggtggaacatggcatcacttccgagaagcagtggattcaggagaatcaggagagctacctgtccttcaactccacgggaaactctcggagccagattaaagccgcgcttgacaacgcgtcaaaaattatgagtctgaccaaatctgcctcagactatctcgtgggacagactgttccagaggacatttctgaaaacagaatctggcagatttttgatctcaacggctacgacccggcatacgcgggctctgttctctacggctggtgcactcgcgcctttggaaagaggaacaccgtctggctgtatggacccgcgaccaccggaaagaccaacatcgcggaagccatctctcacaccgtgcccttttatggctgtgtgaactggactaatgagaactttccctttaatgactgtgtggaaaaaatgttgatctggtgggaggagggaaagatgaccagcaaggtggtggaacccgccaaggccatcttgggggggtctagagtacgagtggatcaaaaatgtaaatcctctgtacaagtagactctaccccggtgattatcacctccaatactaacatgtgtgtggtggtggatgggaactccacgacctttgaacaccagcagccgctggaagaccgcatgttcagatttgaactcatgcggcggctcccgccagattttggcaagattaccaagcaggaagtcaaagacttttttgcttgggcaaaggtcaaccaggtgccggtgactcacgagtttatggttcccaagaaagtggcgggaactgagagggcggagacttctagaaaacgcccactggatgacgtcaccaataccaactataaaagtccggagaagcgggcccggctctcagttgttcctgagacgcctcgcagttcagacgtgcctgtagagcccgctcctctgcgacctctcaactggtcttccaggtatgaatgcagatgtgactatcatgctaaatttgactctgtaacgggggaatgtgacgagtgtgaatatttgaatcggggcaaaaatggctgtatctttcataatgctacacattgtcaaatttgtcacgctgttcctccatgggaaaaggaaaatgtgtcagattttaatgattttgatgactgtaataaagagcagtaa

SEQ ID NO: 523 - DNA, 1833 bp, Bovine Adeno-associated Virus
atggctaccttctatgaagtcattgttcgcgttccatttgatgtggaagagcacctgcctggaatttctgacaactttgtagactgggtaactggtcaaatttgggagctgcctcccgagtcagatttgaatttgactctgattgagcagcctcagctgacggtggctgacagaattcgccgcgtgttcctgtacgagtggaacaaattttccaagcaggagagcaaattctttgtgcagtttgaaaagggatctgaatattttcatctgcacacgctcgtggagacctccggcatctcttctatggtccttggccgctacgtgagtcagattcgcgcccagctggtgaaggtggtgttccagaacattgagccgcggattaacgactgggtcgccatcaccaaggtaaagaagggcggagccaataaggtggtggattctgggtatattcccgcctacctgctgccgaaggtccaaccagagcttcagtgggcgtggactaacctcgaagagtataaattggccgccctcaatctggaggagcgcaaacggctcgtcgctcagtttcagcttgagtcctcgcagcgctcgcaagaggcatcttcccagagggacgtttcggctgacccggtcatcaagagcaagacttcccagaaatacatggcgctggtaagctggctggtggaacatggcatcacttccgagaagcagtggattcaggagaatcaggagagctacctgtccttcaactccacgggaaactctcggagccagattaaagccgcgcttgacaacgcgtcaaaaattatgagtctgaccaaatctgcctcagactatctcgtgggacagactgttccagaggacatttctgaaaacagaatctggcagatttttgatctcaacggctacgacccggcatacgcgggctctgttctctacggctggtgcactcgcgcctttggaaagaggaacaccgtctggctgtatggacccgcgaccaccggaaagaccaacatcgcggaagccatctctcacaccgtgcccttttatggctgtgtgaactggactaatgagaactttccctttaatgactgtgtggaaaaaatgttgatctggtgggaggagggaaagatgaccagcaaggtggtggaacccgccaaggccatcttgggggggtctagagtacgagtggatcaaaaatgtaaatcctctgtacaagtagactctaccccggtgattatcacctccaatactaacatgtgtgtggtggtggatgggaactccacgacctttgaacaccagcagccgctggaagaccgcatgttcagatttgaactcatgcggcggctcccgccagattttggcaagattaccaagcaggaagtcaaagacttttttgcttgggcaaaggtcaaccaggtgccggtgactcacgagtttatggttcccaagaaagtggcgggaactgagagggcggagacttctagaaaacgcccactggatgacgtcaccaataccaactataaaagtccggagaagcgggcccggctctcagttgttcctgagacgcctcgcagttcagacgtgcctgtagagcccgctcctctgcgacctctcaactggtcttccaggtatgaatgcagatgtgactatcatgctaaatttgactctgtaacgggggaatgtgacgagtgtgaatatttgaatcggggcaaaaatggctgtatctttcataatgctacacattgtcaaatttgtcacgctgttcctccatgggaaaaggaaaatgtgtcagattttaatgattttgatgactgtaataaagagcagtaa

SEQ ID NO: 524 - DNA, 2211 bp, Bovine Adeno-associated Virus
atgtcttttgttgaccaccctccagattggttggaatcgatcggcgacggctttcgtgaatttctcggccttgaggcgggtcccccgaaacccaaggccaatcaacagaagcaagataacgctcgaggtcttgtgcttcctgggtacaagtatcttggtcctgggaacggccttgataagggcgatcctgtcaattttgctgacgaggttgcccgagagcacgacctctcctaccagaaacagcttgaggcgggcgataacccttacctcaagtacaaccacgcggacgcagagtttcaggagaaactcgcttctgacacttcttttgggggaaaccttgggaaggctgttttccaggctaaaaagaggattctcgaacctcttggcctggttgagacgccggataaaacggcgcctgcggcaaaaaagaggcctctagagcagagtcctcaagagccagactcctcgagcggagttggcaagaaaggcaaacagcctgccagaaagagactcaactttgacgacgaacctggagccggagacgggcctcccccagaaggaccatcttccggagctatgtctactgagactgaaatgcgtgcagcagctggcggaaatggtggcgatgcgggacaaggtgccgagggagtgggtaatgcctccggtgattggcattgcgattccacttggtcagagagccacgtcaccaccacctcaacccgcacctgggtcctgccgacctacaacaaccacctgtacctgcggctcggctcgagcaacgccagcgacaccttcaacggattctccaccccctggggatactttgactttaaccgcttccactgccacttctcgccaagagactggcaaaggctcatcaacaaccactggggactgcgccccaaaagcatgcaagtccgcatcttcaacatccaagttaaggaggtcacgacgtctaacggggagacgaccgtatccaacaacctcaccagcacggtccagatctttgcggacagcacgtacgagctcccgtacgtgatggatgcaggtcaggagggcagcttgcctcctttccccaacgacgtgttcatggtgcctcagtacgggtactgcggactggtaaccggaggcagctctcaaaaccagacagacagaaatgccttctactgtctggagtactttcccagccagatgctgagaaccggaaacaactttgagatggtgtacaagtttgaaaacgtgcccttccactccatgtacgctcacagccagagcctggataggctgatgaacccgctgctggaccagtacctgtgggagctccagtctaccacctctggaggaactctcaaccagggcaattcagccaccaactttgccaagctgaccaaaacaaacttttctggctaccgcaaaaactggctcccggggcccatgatgaagcagcagagattctccaagactgccagtcaaaactacaagattccccagggaagaaacaacagtctgctccattatgagaccagaactaccctcgacggaagatggagcaattttgccccgggaacggccatggcaaccgcagccaacgacgccaccgacttctctcaggcccagctcatctttgcggggcccaacatcaccggcaacaccaccacagatgccaataacctgatgttcacttcagaagatgaacttagggccaccaacccccgggacactgacctgtttggccacctggcaaccaaccagcaaaacgccaccaccgttcctaccgtagacgacgtggacggagtcggcgtgtacccgggaatggtgtggcaggacagagacatttactaccaagggcccatttgggccaaaattccacacacggatggacactttcacccgtctcctctcattggcggatttggactgaaaagcccgcctccacaaatattcatcaaaaacactcctgtacccgccaatcccgcaacgaccttctctccggccagaatcaacagcttcatcacccagtacagcaccggacaggtggctgtcaaaatagaatgggaaatccagaaggagcggtccaagagatggaacccagaggtccagttcacgtccaactacggagcacaggactcgcttctctgggctcccgacaacgccggagcctacaaagagcccagggccattggatcccgatacctcaccaaccacctctag

SEQ ID NO: 525 - DNA, 4694 bp, Bovine Adeno-associated Virus
gtggcactcccccccctgtcgcgttcgctcgttcgctggctcgattgggggggtggcagctcaaagagctgccagacgacggccctctgggccgtcgcccccccaatcgagccagcgaacgagcgaacgcgacaggggggggagtgccacactctctagcaagggggttttgtaggtggtgatgtcattgttgatgtcattatagttgtcacgcgatagttaatgattaacagtcatgtgatgtgtgttatccaataggatgaaagcgcgcgaatgagatctcgcgagacttccggggtataaaaggggtgagtgaacgagcccgccgccattctctgctctggactgctagaggaccctcgctgccatggctaccttctatgaagtcattgttcgcgttccatttgatgtggaagagcacctgcctggaatttctgacaactttgtagactgggtaactggtcaaatttgggagctgcctcccgagtcagatttgaatttgactctgattgagcagcctcagctgacggtggctgacagaattcgccgcgtgttcctgtacgagtggaacaaattttccaagcaggagagcaaattctttgtgcagtttgaaaagggatctgaatattttcatctgcacacgctcgtggagacctccggcatctcttctatggtccttggccgctacgtgagtcagattcgcgcccagctggtgaaggtggtgttccagaacattgagccgcggattaacgactgggtcgccatcaccaaggtaaagaagggcggagccaataaggtggtggattctgggtatattcccgcctacctgctgccgaaggtccaaccagagcttcagtgggcgtggactaacctcgaagagtataaattggccgccctcaatctggaggagcgcaaacggctcgtcgctcagtttcagcttgagtcctcgcagcgctcgcaagaggcatcttcccagagggacgtttcggctgacccggtcatcaagagcaagacttcccagaaatacatggcgctggtaagctggctggtggaacatggcatcacttccgagaagcagtggattcaggagaatcaggagagctacctgtccttcaactccacgggaaactctcggagccagattaaagccgcgcttgacaacgcgtcaaaaattatgagtctgaccaaatctgcctcagactatctcgtgggacagactgttccagaggacatttctgaaaacagaatctggcagatttttgatctcaacggctacgacccggcatacgcgggctctgttctctacggctggtgcactcgcgcctttggaaagaggaacaccgtctggctgtatggacccgcgaccaccggaaagaccaacatcgcggaagccatctctcacaccgtgcccttttatggctgtgtgaactggactaatgagaactttccctttaatgactgtgtggaaaaaatgttgatctggtgggaggagggaaagatgaccagcaaggtggtggaacccgccaaggccatcttgggggggtctagagtacgagtggatcaaaaatgtaaatcctctgtacaagtagactctaccccggtgattatcacctccaatactaacatgtgtgtggtggtggatgggaactccacgacctttgaacaccagcagccgctggaagaccgcatgttcagatttgaactcatgcggcggctcccgccagattttggcaagattaccaagcaggaagtcaaagacttttttgcttgggcaaaggtcaaccaggtgccggtgactcacgagtttatggttcccaagaaagtggcgggaactgagagggcggagacttctagaaaacgcccactggatgacgtcaccaataccaactataaaagtccggagaagcgggcccggctctcagttgttcctgagacgcctcgcagttcagacgtgcctgtagagcccgctcctctgcgacctctcaactggtcttccaggtatgaatgcagatgtgactatcatgctaaatttgactctgtaacgggggaatgtgacgagtgtgaatatttgaatcggggcaaaaatggctgtatctttcataatgctacacattgtcaaatttgtcacgctgttcctccatgggaaaaggaaaatgtgtcagattttaatgattttgatgactgtaataaagagcagtaaataaagtgagtagtcatgtcttttgttgaccaccctccagattggttggaatcgatcggcgacggctttcgtgaatttctcggccttgaggcgggtcccccgaaacccaaggccaatcaacagaagcaagataacgctcgaggtcttgtgcttcctgggtacaagtatcttggtcctgggaacggccttgataagggcgatcctgtcaattttgctgacgaggttgcccgagagcacgacctctcctaccagaaacagcttgaggcgggcgataacccttacctcaagtacaaccacgcggacgcagagtttcaggagaaactcgcttctgacacttcttttgggggaaaccttgggaaggctgttttccaggctaaaaagaggattctcgaacctcttggcctggttgagacgccggataaaacggcgcctgcggcaaaaaagaggcctctagagcagagtcctcaagagccagactcctcgagcggagttggcaagaaaggcaaacagcctgccagaaagagactcaactttgacgacgaacctggagccggagacgggcctcccccagaaggaccatcttccggagctatgtctactgagactgaaatgcgtgcagcagctggcggaaatggtggcgatgcgggacaaggtgccgagggagtgggtaatgcctccggtgattggcattgcgattccacttggtcagagagccacgtcaccaccacctcaacccgcacctgggtcctgccgacctacaacaaccacctgtacctgcggctcggctcgagcaacgccagcgacaccttcaacggattctccaccccctggggatactttgactttaaccgcttccactgccacttctcgccaagagactggcaaaggctcatcaacaaccactggggactgcgccccaaaagcatgcaagtccgcatcttcaacatccaagttaaggaggtcacgacgtctaacggggagacgaccgtatccaacaacctcaccagcacggtccagatctttgcggacagcacgtacgagctcccgtacgtgatggatgcaggtcaggagggcagcttgcctcctttccccaacgacgtgttcatggtgcctcagtacgggtactgcggactggtaaccggaggcagctctcaaaaccagacagacagaaatgccttctactgtctggagtactttcccagccagatgctgagaaccggaaacaactttgagatggtgtacaagtttgaaaacgtgcccttccactccatgtacgctcacagccagagcctggataggctgatgaacccgctgctggaccagtacctgtgggagctccagtctaccacctctggaggaactctcaaccagggcaattcagccaccaactttgccaagctgaccaaaacaaacttttctggctaccgcaaaaactggctcccggggcccatgatgaagcagcagagattctccaagactgccagtcaaaactacaagattccccagggaagaaacaacagtctgctccattatgagaccagaactaccctcgacggaagatggagcaattttgccccgggaacggccatggcaaccgcagccaacgacgccaccgacttctctcaggcccagctcatctttgcggggcccaacatcaccggcaacaccaccacagatgccaataacctgatgttcacttcagaagatgaacttagggccaccaacccccgggacactgacctgtttggccacctggcaaccaaccagcaaaacgccaccaccgttcctaccgtagacgacgtggacggagtcggcgtgtacccgggaatggtgtggcaggacagagacatttactaccaagggcccatttgggccaaaattccacacacggatggacactttcacccgtctcctctcattggcggatttggactgaaaagcccgcctccacaaatattcatcaaaaacactcctgtacccgccaatcccgcaacgaccttctctccggccagaatcaacagcttcatcacccagtacagcaccggacaggtggctgtcaaaatagaatgggaaatccagaaggagcggtccaagagatggaacccagaggtccagttcacgtccaactacggagcacaggactcgcttctctgggctcccgacaacgccggagcctacaaagagcccagggccattggatcccgatacctcaccaaccacctctagcccaattctgttgcataccctcaataaaccgtgtattcgtttcagtaaaatactgcctcttgtggtcattcggcgtacaacagcttacaacaacaacaaaacccccttgctagagagtgtggcactcccccccctgtcgcgttcgctcgttcgctggctcgattgggggggtggcagctcaaagagctgccagacgacggccctctgggccgtcgcccccccaatcgagccagcgaacgagcgaacgcgacaggggggggagtgccac

SEQ ID NO: 526 - protein, 390 aa, Bovine Adeno-associated Virus
MALVSWLVEHGITSEKQWIQENQESYLSFNSTGNSRSQIKAALDNASKIMSLTKSASDYLVGQTVPEDISENRIWQIFDLNGYDPAYAGSVLYGWCTRAFGKRNTVWLYGPATTGKTNIAEAISHTVPFYGCVNWTNENFPFNDCVEKMLIWWEEGKMTSKVVEPAKAILGGSRVRVDQKCKSSVQVDSTPVIITSNTNMCVVVDGNSTTFEHQQPLEDRMFRFELMRRLPPDFGKITKQEVKDFFAWAKVNQVPVTHEFMVPKKVAGTERAETSRKRPLDDVTNTNYKSPEKRARLSVVPETPRSSDVPVEPAPLRPLNWSSRYECRCDYHAKFDSVTGECDECEYLNRGKNGCIFHNATHCQICHAVPPWEKENVSDFNDFDDCNKEQ

SEQ ID NO: 527 - protein, 610 aa, Bovine Adeno-associated Virus
MATFYEVIVRVPFDVEEHLPGISDNFVDWVTGQIWELPPESDLNLTLIEQPQLTVADRIRRVFLYEWNKFSKQESKFFVQFEKGSEYFHLHTLVETSGISSMVLGRYVSQIRAQLVKVVFQNIEPRINDWVAITKVKKGGANKVVDSGYIPAYLLPKVQPELQWAWTNLEEYKLAALNLEERKRLVAQFQLESSQRSQEASSQRDVSADPVIKSKTSQKYMALVSWLVEHGITSEKQWIQENQESYLSFNSTGNSRSQIKAALDNASKIMSLTKSASDYLVGQTVPEDISENRIWQIFDLNGYDPAYAGSVLYGWCTRAFGKRNTVWLYGPATTGKTNIAEAISHTVPFYGCVNWTNENFPFNDCVEKMLIWWEEGKMTSKVVEPAKAILGGSRVRVDQKCKSSVQVDSTPVIITSNTNMCVVVDGNSTTFEHQQPLEDRMFRFELMRRLPPDFGKITKQEVKDFFAWAKVNQVPVTHEFMVPKKVAGTERAETSRKRPLDDVTNTNYKSPEKRARLSVVPETPRSSDVPVEPAPLRPLNWSSRYECRCDYHAKFDSVTGECDECEYLNRGKNGCIFHNATHCQICHAVPPWEKENVSDFNDFDDCNKEQ

SEQ ID NO: 528 - protein, 538 aa, Bovine Adeno-associated Virus
MRAAAGGNGGDAGQGAEGVGNASGDWHCDSTWSESHVTTTSTRTWVLPTYNNHLYLRLGSSNASDTFNGFSTPWGYFDFNRFHCHFSPRDWQRLINNHWGLRPKSMQVRIFNIQVKEVTTSNGETTVSNNLTSTVQIFADSTYELPYVMDAGQEGSLPPFPNDVFMVPQYGYCGLVTGGSSQNQTDRNAFYCLEYFPSQMLRTGNNFEMVYKFENVPFHSMYAHSQSLDRLMNPLLDQYLWELQSTTSGGTLNQGNSATNFAKLTKTNFSGYRKNWLPGPMMKQQRFSKTASQNYKIPQGRNNSLLHYETRTTLDGRWSNFAPGTAMATAANDATDFSQAQLIFAGPNITGNTTTDANNLMFTSEDELRATNPRDTDLFGHLATNQQNATTVPTVDDVDGVGVYPGMVWQDRDIYYQGPIWAKIPHTDGHFHPSPLIGGFGLKSPPPQIFIKNTPVPANPATTFSPARINSFITQYSTGQVAVKIEWEIQKERSKRWNPEVQFTSNYGAQDSLLWAPDNAGAYKEPRAIGSRYLTNHL

SEQ ID NO: 529 - protein, 736 aa, Artificial Sequence
  Description of Artificial Sequence: Synthetic polypeptide
MSFVDHPPDWLESIGDGFREFLGLEAGPPKPKANQQKQDNARGLVLPGYKYLGPGNGLDKGDPVNFADEVAREHDLSYQKQLEAGDNPYLKYNHADAEFQEKLASDTSFGGNLGKAVFQAKKRILEPLGLVETPDKTAPAAKKRPLEQSPQEPDSSSGVGKKGKQPARKRLNFDDEPGAGDGPPPEGPSSGAMSTETEMRAAAGGNGGDAGQGAEGVGNASGDWHCDSTWSESHVTTTSTRTWVLPTYNNHLYLRLGSSNASDTFNGFSTPWGYFDFNRFHCHFSPRDWQRLINNHWGLRPKSMQVRIFNIQVKEVTTSNGETTVSNNLTSTVHIFADSTYELPYVMDAGQEGSLPPFPNDVFMVPQYGYCGLVTGGSSQNQTDRNAFYCLEYFPSQMLRTGNNFEMVYKFENVPFHSMYAHSQSLDRLMNPLLDQYLWELQSTTSGGTLNQGNSATNFAKLTNKNFSGYRKNWLPGPMMKQQRFSKTASQNYKIPQGGNNSLLHYETRTTLDRRWSNFAPGTAMATAANDATDFSQAQLIFAGPNITGNTTTDANNLMFTSEDELRATNPRDTDLFGHLATNQQNATTVPTVDDVDGVGVYPGMVWQDRDIYYQGPIWAKIPHTDGHFHPSPLIGGFGLKSPPPQIFIKNTPVPANPATTFSPARINSFITQYSTGQVAVKIEWEIQKERSKRWNPEVQFTSNYGAQDSLLWAPDNAGAYKEPRAIGSRYLTNHL

SEQ ID NO: 530 - protein, 736 aa, Artificial Sequence
  Description of Artificial Sequence: Synthetic polypeptide
MSFVDHPPDWLESIGDGFREFLGLEAGPPKPKANQQKQDNARGLVLPGYKYLGPGNGLDKGDPVNFADEVAREHDLSYQKQLEAGDNPYLKYNHADAEFQEKLASDTSFGGNLGKAVFQAKKRILEPLGLVETPDKTAPAAKKRPLEQSPQEPDSSSGVGKKGKQPARKRLNFDDEPGAGDGPPPEGPSSGAMSTETEMRAAAGGNGGDAGQGAEGVGNASGDWHCDSTWSESHVTTTSTRTWVLPTYNNHLYLRLGSSNASDTFNGFSTPWGYFDFNRFHCHFSPRDWQRLINNHWGLRPKSMQVRIFNIQVKEVTTSNGETTVSNNLTSTVQIFADSTYELPYVMDAGQEGSLPPFPNDVFMVPQYGYCGLVTGGSSQNQTDRNAFYCLEYFPSQMLRTGNNFEMVYKFENVPFHSMYAHSQSLDRLMNPLLDQYLWELQSTTSGGTLNQGNSATNFAKLTKTNFSGYRKNWLPGPMMKQQRFSKTASQNYKIPQGRNNSLLHYETRTTLDGRWSNFAPGTAMATAANDATDFSQAQLIFAGPNITGNTTTDANNLMFTSEDELRATNPRDTDLFGHLATNQQNATTVPTVDDVDGVGVYPGMVWQDRDIYYQGPIWAKIPHTDGHFHPSPLIGGFGLKSPPPQIFIKNTPVPANPATTFSPARINSFITQYSTGQVAVKIEWEIQKERSKRWNPEVQFTSNYGAQDSLLWAPDNAGAYKEPRAIGSRYLTNHL

SEQ ID NO: 531 - protein, 736 aa, Bovine Adeno-associated Virus; identical to SEQ ID NO: 530

SEQ ID NO: 532 - protein, 600 aa, Bovine Adeno-associated Virus
TAPAAKKRPLEQSPQEPDSSSGVGKKGKQPARKRLNFDDEPGAGDGPPPEGPSSGAMSTETEMRAAAGGNGGDAGQGAEGVGNASGDWHCDSTWSESHVTTTSTRTWVLPTYNNHLYLRLGSSNASDTFNGFSTPWGYFDFNRFHCHFSPRDWQRLINNHWGLRPKSMQVRIFNIQVKEVTTSNGETTVSNNLTSTVQIFADSTYELPYVMDAGQEGSLPPFPNDVFMVPQYGYCGLVTGGSSQNQTDRNAFYCLEYFPSQMLRTGNNFEMVYKFENVPFHSMYAHSQSLDRLMNPLLDQYLWELQSTTSGGTLNQGNSATNFAKLTKTNFSGYRKNWLPGPMMKQQRFSKTASQNYKIPQGRNNSLLHYETRTTLDGRWSNFAPGTAMATAANDATDFSQAQLIFAGPNITGNTTTDANNLMFTSEDELRATNPRDTDLFGHLATNQQNATTVPTVDDVDGVGVYPGMVWQDRDIYYQGPIWAKIPHTDGHFHPSPLIGGFGLKSPPPQIFIKNTPVPANPATTFSPARINSFITQYSTGQVAVKIEWEIQKERSKRWNPEVQFTSNYGAQDSLLWAPDNAGAYKEPRAIGSRYLTNHL

SEQ ID NO: 533 - DNA, 2214 bp, Artificial Sequence
  Description of Artificial Sequence: Synthetic polynucleotide
atggctgccgatggttatcttccagattggctcgaggacactctctctgaaggaataagacagtggtggaagctcaaacctggcccaccaccaccaaagcccgcagagcggcataaggacgacagcaggggtcttgtgcttcctgggtacaagtacctcggacccttcaacggactcgacaagggagagccggtcaacgaggcagacgccgcggccctcgagcacgacaaagcctacgaccggcagctcgacagcggagacaacccgtacctcaagtacaaccacgccgacgcggagtttcaggagcgccttaaagaagatacgtcttttgggggcaacctcgggcgagcagtcttccaggccaaaaagaggcttcttgaacctcttggtctggttgaggaagcggctaagacggctcctggaaagaagaggcctgtagagcagtctcctcaggaaccggactcctcctcgggcatcggcaagacaggccagcagcccgctaaaaagagactcaatttcggtcagactggcgacacagagtcagtcccagaccctcaaccaatcggagaacctcccgcagccccctcaggtgtgggatctcttacaatggcttcaggtggtggcgcaccagtggcagacaataacgaaggtgccgatggagtgggtagttcctcgggaaattggcattgcgattcccaatggctgggggacagagtcatcaccaccagcacccgaacctgggccctgcccacctacaacaatcacctctacaagcaaatctccaacgggacatcgggaggagccaccaacgacaacacctacttcggctacagcaccccctgggggtattttgactttaacagattccactgccacttttcaccacgtgactggcagcgactcatcaacaacaactggggattccggcccaagagactcagcttcaagctcttcaacatccaggtcaaggaggtcacgcagaatgaaggcaccaagaccatcgccaataaccttaccagcacggtccaggtcttcacggactcggagtaccagctgccgtacgttctcggctctgcccaccagggctgcctgcctccgttcccggcggacgtgttcatgattccccagtacggctacctaacactcaacaacggtagtcaggccgtgggacgctcctccttctactgcctggaatactttccttcgcagatgctgagaaccggcaacaacttccagtttacttacaccttcgaggacgtgcctttccacagcagctacgcccacagccagagcttggaccggctgatgaatcctctgattgaccagtacctgtactacttgtctcggactcaaacaacaggaggcacggcaaatacgcagactctgggcttcagccaaggtgggcctaatacaatggccaatcaggcaaagaactggctgccaggaccctgttaccgccaacaacgcgtctcaacgacaaccgggcaaaacaacaatagcaactttgcctggactgctgggaccaaataccatctgaatggaagaaattcattggctaatcctggcatcgctatggcaacacacaaagacgacaaggagcgtttttttcccagtaacgggatcctgatttttggcaaacaaaatgctgccagagacaatgcggattacagcgatgtcatgctcaccagcgaggaagaaatcaaaaccactaaccctgtggctacagaggaatacggtatcgtggcagataacttgcagcagcaaaacacggctcctcaaattggaactgtcaacagccagggggccttacccggtatggtttggcagaaccgggacgtgtacctgcagggtcccatctgggccaagattcctcacacggacggcaacttccacccgtctccgctgatgggcggctttggcctgaaacatcctccgcctcagatcctgatcaagaacacgcctgtacctgcggatcctccgaccaccttcaaccagtcaaagctgaactctttcatcacgcaatacagcaccggacaggtcagcgtggaaattgaatgggagctgcagaaggaaaacagcaagcgctggaaccccgagatccagtacacctccaactactacaaatctacaagtgtggactttgctgttaatacagaaggcgtgtactctgaaccccaccccattggcacccgttacctcacccgtcccctgtaa

SEQ ID NO: 534 - protein, 737 aa, Artificial Sequence
  Description of Artificial Sequence: Synthetic polypeptide
MAADGYLPDWLEDTLSEGIRQWWKLKPGPPPPKPAERHKDDSRGLVLPGYKYLGPFNGLDKGEPVNEADAAALEHDKAYDRQLDSGDNPYLKYNHADAEFQERLKEDTSFGGNLGRAVFQAKKRLLEPLGLVEEAAKTAPGKKRPVEQSPQEPDSSSGIGKTGQQPAKKRLNFGQTGDTESVPDPQPIGEPPAAPSGVGSLTMASGGGAPVADNNEGADGVGSSSGNWHCDSQWLGDRVITTSTRTWALPTYNNHLYKQISNGTSGGATNDNTYFGYSTPWGYFDFNRFHCHFSPRDWQRLINNNWGFRPKRLSFKLFNIQVKEVTQNEGTKTIANNLTSTVQVFTDSEYQLPYVLGSAHQGCLPPFPADVFMIPQYGYLTLNNGSQAVGRSSFYCLEYFPSQMLRTGNNFQFTYTFEDVPFHSSYAHSQSLDRLMNPLIDQYLYYLSRTQTTGGTANTQTLGFSQGGPNTMANQAKNWLPGPCYRQQRVSTTTGQNNNSNFAWTAGTKYHLNGRNSLANPGIAMATHKDDKERFFPSNGILIFGKQNAARDNADYSDVMLTSEEEIKTTNPVATEEYGIVADNLQQQNTAPQIGTVNSQGALPGMVWQNRDVYLQGPIWAKIPHTDGNFHPSPLMGGFGLKHPPPQILIKNTPVPADPPTTFNQSKLNSFITQYSTGQVSVEIEWELQKENSKRWNPEIQYTSNYYKSTSVDFAVNTEGVYSEPHPIGTRYLTRPL

SEQ ID NO: 535 - protein, 736 aa, Artificial Sequence
  Description of Artificial Sequence: Synthetic polypeptide
MAADGYLPDWLEDNLSEGIREWWDLKPGAPKPKANQQKQDDGRGLVLPGYKYLGPFNGLDKGEPVNAADAAALEHDKAYDQQLKAGDNPYLRYNHADAEFQERLQEDTSFGGNLGRAVFQAKKRVLEPLGLVEEGAKTAPGKKRPVEQSPQEPDSSSGIGKTGQQPAKKRLNFGQTGDTESVPDPQPIGEPPAAPSGVGSLTMASGGGAPVADNNEGADGVGSSSGNWHCDSQWLGDRVITTSTRTWALPTYNNHLYKQISSASTGASNDNHYFGYSTPWGYFDFNRFHCHFSPRDWQRLINNNWGFRPKRLNFKLFNIQVKEVTDNNGVKTIANNLTSTVQVFTDSDYQLPYVLGSAHQGCLPPFPADVFMIPQYGYLTLNNGSQAVGRSSFYCLEYFPSQMLRTGNNFQFTYTFEDVPFHSSYAHSQSLDRLMNPLIDQYLYYLSRTQTTGGTANTQTLGFSQGGPNTMANQAKNWLPGPCYRQQRVSTTTGQNNNSNFAWTAGTKYHLNGRNSLANPGIAMATHKDDKERFFPSNGILIFGKQNAARDNADYSDVMLTSEEEIKTTNPVATEEYGIVADNLQQQNTAPQIGTVNSQGALPGMVWQNRDVYLQGPIWAKIPHTDGNFHPSPLMGGFGLKHPPPQILIKNTPVPADPPTTFNQSKLNSFITQYSTGQVSVEIEWELQKENSKRWNPEIQYTSNYYKSTSVDFAVNTEGVYSEPHPIGTRYLTRPL

SEQ ID NO: 536 - protein, 736 aa, Artificial Sequence
  Description of Artificial Sequence: Synthetic polypeptide
MAADGYLPDWLEDTLSEGIRQWWKLKPGPPPPKPAERHKDDSRGLVLPGYKYLGPFNGLDKGEPVNEADAAALEHDKAYDRQLDSGDNPYLKYNHADAEFQERLQGDTSFGGNLGRAVFQAKKRVLEPLGLVEEGAKTAPGKKRPVEQSPQEPDSSSGIGETGQQPAKKRLNFGQTGDSESVPDPQPLGEPPATPAAVGPTTMASGGGAPMADNNEGADGVGSSSGNWHCDSQWLGDRVITTSTRTWALPTYNNHLYKQISSASTGASNDNHYFGYSTPWGYFDFNRFHCHFSPRDWQRLINNNWGFRPKRLSFKLFNIQVKEVTDNNGVKTIANNLTSTVQVFTDSEYQLPYVLGSAHQGCLPPFPADVFMIPQYGYLTLNNGSQAVGRSSFYCLEYFPSQMLRTGNNFTFSYTFEDVPFHSSYAHSQSLDRLMNPLIDQYLYYLSRTQTTGGTANTQTLGFSQGGPNTMANQAKNWLPGPCYRQQRVSTTTGQNNNSNFAWTAGTKYHLNGRNSLANPGIAMATHKDDKERFFPSNGILIFGKQNAARDNADYSDVMLTSEEEIKTTNPVATEEYGIVADNLQQQNTAPQIGTVNSQGALPGMVWQNRDVYLQGPIWAKIPHTDGNFHPSPLMGGFGLKHPPPQILIKNTPVPADPPTTFNQSKLNSFITQYSTGQVSVEIEWELQKENSKRWNPEIQYTSNYYKSTSVDFAVNTEGVYSEPHPIGTRYLTRPL

SEQ ID NO: 537 - DNA, 2181 bp, Artificial Sequence
  Description of Artificial Sequence: Synthetic polynucleotide
atgtcttttgttgatcaccctccagattggttggaagaagttggtgaaggtcttcgcgagtttttgggccttgaagcgggcccaccgaaaccaaaacccaatcagcagcatcaagatcaagcccgtggtcttgtgctgcctggttataactatctcggacccggaaacggtctcgatcgaggagagcctgtcaacagggcagacgaggtcgcgcgagagcacgacatctcgtacaacgagcagcttgaggcgggagacaacccctacctcaagtacaaccacgcggacgccgagtttcaggagaagctcgccgacgacacatccttcgggggaaacctcggaaaggcagtctttcaggccaagaaaagggttctcgaaccttttggcctggttgaagagggtgctaagacggcccctaccggaaagcggatagacgaccactttccaaaaagaaagaaggctcggaccgaagaggactccaagccttccacctcgtcagacgccgaagctggacccagcggatcccagcagctgcaaatcccagcacaaccagcctcaagtttgggagctgatacaatgtctgcgggaggtggcggcccattgggcgacaataaccaaggtgccgatggagtgggcaatgcctcgggagattggcattgcgattccacgtggatgggggacagagtcgtcaccaagtccacccgcacctgggtgctgcccagctacaacaaccaccagtaccgagagatcaaaagcggctccgtcgacggaagcaacgccaacgcctactttggatacagcaccccctgggggtactttgactttaaccgcttccacagccactggagcccccgagactggcaaagactcatcaacaactattggggcttcagaccccggtctctcagagtcaaaatcttcaacatccaagtcaaagaggtcacggtgcaggactccaccaccaccatcgccaacaacctcacctccaccgtccaagtgtttacggacgacgactaccaactcccgtacgtcgtcggcaacgggaccgagggatgcctgccggccttccccccgcaggtctttacgctgccgcagtacggctacgcgacgctgaaccgagacaacggagacaacccgacagagcggagcagcttcttttgcctagagtactttcccagcaagatgctgaggacgggcaacaactttgagtttacctacagctttgaagaggtgcccttccactgcagcttcgccccgagccagaacctctttaagctggccaacccgctggtggaccagtacctgtaccgcttcgtgagcacctcggccacgggcgccatccagttccaaaagaacctggcgggcagatacgccaacacctacaaaaactggttcccggggcccatgggccgaacccagggctggaacacgagctctggggtcagcagcaccaacagagtcagcgtcaacaacttttccgtctcaaaccggatgaacctggagggggccagctaccaagtgaacccccagcccaacgggatgacaaacacgctccaaggcagcaaccgctacgcgctggaaaacaccatgatcttcaacgctcaaaacgccacgccgggaactacctcggtgtacccagaggacaatctactgctgaccagcgagagcgagactcagcccgtcaaccgggtggcttacaacacgggcggtcagatggccaccaacgcccagaacgccaccacggctcccacggtcgggacctacaacctccaggaagtgcttcctggcagcgtatggatggagagggacgtgtacctccaaggacccatctgggccaagatcccagagacgggggcgcactttcacccctctccggccatgggcggattcggactcaaacacccgccgcccatgatgctcatcaaaaacacgccggtgcccggcaacatcaccagcttctcggacgtgcccgtcagcagcttcatcacccagtacagcaccgggcaggtcaccgtggagatggaatgggagctcaaaaaggaaaactccaagaggtggaacccagagatccagtacaccaacaactacaacgacccccagtttgtggactttgctccagacggctccggcgaatacagaaccaccagagccatcggaacccgatacctcacccgacccctt

SEQ ID NO: 538 - protein, 726 aa, Artificial Sequence
  Description of Artificial Sequence: Synthetic polypeptide
MSFVDHPPDWLEEVGEGLREFLGLEAGPPKPKPNQQHQDQARGLVLPGYNYLGPGNGLDRGEPVNRADEVAREHDISYNEQLEAGDNPYLKYNHADAEFQEKLADDTSFGGNLGKAVFQAKKRVLEPFGLVEEGAKTAPTGKRIDDHFPKRKKARTEEDSKPSTSSDAEAGPSGSQQLQIPAQPASSLGADTMSAGGGGPLGDNNQGADGVGNASGDWHCDSTWMGDRVVTKSTRTWVLPSYNNHQYREIKSGSVDGSNANAYFGYSTPWGYFDFNRFHSHWSPRDWQRLINNYWGFRPRSLRVKIFNIQVKEVTVQDSTTTIANNLTSTVQVFTDDDYQLPYVVGNGTEGCLPAFPPQVFTLPQYGYATLNRDNGDNPTERSSFFCLEYFPSKMLRTGNNFEFTYSFEEVPFHCSFAPSQNLFKLANPLVDQYLYRFVSTSATGAIQFQKNLAGRYANTYKNWFPGPMGRTQGWNTSSGSSTNRVSVNNFSVSNRMNLEGASYQVNPQPNGMTNTLQGSNRYALENTMIFNAQNATPGTTSVYPEDNLLLTSESETQPVNRVAYNTGGQMATNAQNATTAPTVGTYNLQEVLPGSVWMERDVYLQGPIWAKIPETGAHFHPSPAMGGFGLKHPPPMMLIKNTPVPGNITSFSDVPVSSFITQYSTGQVTVEMEWELKKENSKRWNPEIQYTNNYNDPQFVDFAPDGSGEYRTTRAIGTRYLTRPL

SEQ ID NO: 539 - protein, 735 aa, Artificial Sequence
  Description of Artificial Sequence: Synthetic polypeptide
MAADGYLPDWLEDTLSEGIRQWWKLKPGPPPPKPAERHKDDSRGLVLPGYKYLGPFNGLDKGEPVNEADAAALEHDKAYDRQLDSGDNPYLKYNHADAEFQERLKEDTSFGGNLGRAVFQAKKRILEPLGLVEEPVKTAPGKKRPVEHSPAEPDSSSGTGKSGQQPARKRLNFGQTGDADSVPDPQPLGQPPAAPSGLGTNTMASGSGAPMADNNEGADGVGNSSGNWHCDSTWMGDRVITTSTRTWALPTYNNHLYKQISSQSGASNDNHYFGYSTPWGYFDFNRFHCHFSPRDWQRLINNNWGFRPKRLSFKLFNIQVKEVTQNDGTTTIANNLTSTVQVFTDSEYQLPYVLGSAHQGCLPPFPADVFMVPQYGYLTLNNGSQAVGRSSFYCLEYFPSQMLRTGNNFTFSYTFEDVPFHSSYAHSQSLDRLMNPLIDQYLYYLSRTNTPSGTTTMSRLQFSQAGASDIRDQSRNWLPGPCYRQQRVSKTAADNNNSDYSWTGATKYHLNGRDSLVNPGPAMASHKDDEEKYFPQSGVLIFGKQDSGKTNVDIEKVMITDEEEIRTTNPVATEQYGSVSTNLQSGNTQAATSDVNTQGVLPGMVWQDRDVYLQGPIWAKIPHTDGHFHPSPLMGGFGLKHPPPQILIKNTPVPANPSTTFSAAKFASFITQYSTGQVSVEIEWELQKENSKRWNPEIQYTSNYNKSVNVDFTVDTNGVYSEPRPIGTRYLTRNL

SEQ ID NO: 540 - DNA, 1797 bp, Artificial Sequence
  Description of Artificial Sequence: Synthetic polynucleotide
acggctccgaccggagacaagcggaaaggcgaagacgaacctcgtttgcccgacacttcttcacagactcccaagaaaaacaagaagcctcgcaaggaaagaccttccggcggggcagaagatccgggcgaaggcacctcttccaacgctggagcagcagcacccgcctctagtgtgggatcatctatcatggctgaaggaggtggcggcccagtgggcgatgcaggccagggtgccgatggagtgggcaattcctccggaaattggcattgcgattcccaatggctggaaaacggagtcgtcactcgaaccacccgaacctgggtcttgcccagctacaacaaccacctgtacaaacgaatccaaggacccagcggaggcgacaacaacaacaaattctttggattcagcaccccctggggatactttgactacaatcgattccactgccacttttccccgcgagactggcaacgactcatcaacaacaactggggcatccgtcccaaagcgatgcgctttagactctttaacatccaggttaaagaggtcacggtccaagacttcaacaccaccatcggcaacaacctcaccagtacggtccaggtctttgcggacaaggactaccaactgccgtacgtcctcggatcggctaccgaaggcaccttcccgccgttcccagcggatatctacacgatcccgcagtacgggtactgcacgctaaactacaacaacgaggcggtggatcgttcggccttctactgtctggactactttccctcagacatgctgcggacaggaaataactttgagtttacttacaccttcgaggacgttcctttccatagcatgtttgcccacaaccagacgctagaccggctgatgaatcccctcgtggatcagtacctctgggctttcagctccgtcagccaagcaggctcatctggacgagctcttcattactcgcgggcgactaaaaccaacatggcggctcaatataggaactggttacctgggcctttcttccgtgatcagcaaatctttacgggcgctagcaacatcactaaaaataacgtctttagcgtttgggaaaaaggcaagcaatgggaactcgacaatcggaccaacctaatgcagcccggtcctgcggcagcgaccacctttagcggagaacctgaccgtcaagccatgcaaaacacgctggcttttagcaggaccgtctacgatcaaacgaccgccacgaccgatcgtaaccagatactcatcaccaacgaagacgaaatcagacccaccaactcggtcggtatcgacgcgtggggagcagttcccaccaacaaccagtcgatcgtgacccccggcactcgcgcggccgtcaacaatcaaggggcgcttcccgggatggtgtggcaaaacagagacatttaccctacagggacccatttggccaaaattcccgacactgacaatcacttccatccgtccccgcttattgggcggtttggctgcaagcatccccctccccagattttcattaaaaacacacccgtccctgccaacccttcggaaacgttccagacggccaaagtggcctccttcatcaaccagtactcgaccggacagtgcaccgtcgaaatcttttgggaactcaagaaggaaacctccaagcgctggaaccccgaaatccagttcacctccaactttggcaacgcggccgacatccagtttgccgtctccgacacgggatcctattccgaacctcgtcccatcggtacccgttaccttaccaaacctctgtaa

SEQ ID NO: 541 - DNA, 1989 bp, Artificial Sequence
  Description of Artificial Sequence: Synthetic polynucleotide
atgaggtcgtactacgaggtcatcgttcagctgcccaacgacgtcgagagtcaggtacctggaatctccgattcgttcgtcaactggattacgtcgcgagaatggacgttgcctgaggacgccgattgggatttggaccaggtcgatcaagttcaactgacgctcggcgacaaaatccaacgggagattcgaactcattgggggacgatggccaaagaaccggactttcactattttatccaactggaacaaggtgaggtgttctttcatttacacgtcctgctggaaacgtgttccgtaaagccgatggtactcggaagatatatccgacatattcaacaaaaaattgtgagtaaagtctactgcgccacgagcctacgatggaaggatggatgcgtggtgaccaagaccaaaaatttcgggggcgcgaacaaggtccgggccgagtcgtatattcccgcctacctgatcccgaaacagcaaccggaagtgcagtgggcgtggactaacgtgcccgagtatataaaagcgtgcttgcaccgagaactgcgtgccagtctcgcgcgacttcacttcgaggaggcgggcgtctcgcaatccaaggaaaatctcgcgagaactgcagacggcgctcccgtgatgccgacccgcgtcagcaaacgctacatggagctcgtggattggctcgtggagaaggggatcaccaccgagaaggaatggctgctggaaaacagagaaagctttcggagctttcaggcctcgagcaactcggcgcgtcagatcaagacggccctgcaaggcgccattcaggagatgcttctgaccaagacggcggaggactacctcgtcggaaaggatcccgtctcggacgacgacatccgtcagaaccgcatctacaagattctggaactgaaccactacgacccagcgtacgtggggagtattttggtcgggtggtgccagaagaaatggggcaagcgaaacacgctgtggctgttcggacatgcgaccaccggcaagaccaacatcgcggaggctattgcccatgctgtgccgttctatggatgcgttaactggaccaacgagaactttccgttcaacgactgcgtcgaaaaaatgattatctggtgggaggagggcaaaatgaccgccaaagtggtggaaacagccaaggcgattctgggaggatctcgggtgagagtggaccaaaaatgcaaagcttcggttccgatcgaaccgacgccggtcattattaccagtaacaccaacatgtgttatgtcatcgacgggaacacgaccacgttcgagcataagcagccgttggaggacaggatgtttaagctcgaattgctgactcggttgcctgatgactttggtaaggtgaccaaacaggaggtgcgtcaattcttcaggtggtctcaggatcacctgacccctgtgatcccagaattcctagtgcggaaggcggagtctcgcaaaagacccgccccttccggggaaggctatataagcccgacaaagcggcccgcgctcgcagagcagcagcaggcgtcggagagcgcggacccggttcccaccaggtatcgtatcaaatgctcgaaacattgcggtatggataaaatgttgtttccttgccaaatttgtgaatcgatgaacagagatattaatatttgtgctattcataaaacgaccgactgtaaagagtgtttccccgactacggggataaagatgatgtagaactacccccctgtacagaacacaacgtgtctcgttgttatcaatgtcattcgggcgaattgtatcgcgtgacttcggactctgacgagaaacctgcccccgagagtgatgaaggcaccgagccatcctatgctccctgcacgattcaccacctgatgggcaagagtcacgggttagtcacttgcgcggcgtgtcggttgaaaaatagtacgttgcatgatgacttggatgacggtgatctcgaacaataa

SEQ ID NO: 542 - DNA, 1626 bp, Artificial Sequence
  Description of Artificial Sequence: Synthetic polynucleotide
atgaggtcgtactacgaggtcatcgttcagctgcccaacgacgtcgagagtcaggtacctggaatctccgattcgttcgtcaactggattacgtcgcgagaatggacgttgcctgaggacgccgattgggatttggaccaggtcgatcaagttcaactgacgctcggcgacaaaatccaacgggagattcgaactcattgggggacgatggccaaagaaccggactttcactattttatccaactggaacaaggtgaggtgttctttcatttacacgtcctgctggaaacgtgttccgtaaagccgatggtactcggaagatatatccgacatattcaacaaaaaattgtgagtaaagtctactgcgccacgagcctacgatggaaggatggatgcgtggtgaccaagaccaaaaatttcgggggcgcgaacaaggtccgggccgagtcgtatattcccgcctacctgatcccgaaacagcaaccggaagtgcagtgggcgtggactaacgtgcccgagtatataaaagcgtgcttgcaccgagaactgcgtgccagtctcgcgcgacttcacttcgaggaggcgggcgtctcgcaatccaaggaaaatctcgcgagaactgcagacggcgctcccgtgatgccgacccgcgtcagcaaacgctacatggagctcgtggattggctcgtggagaaggggatcaccaccgagaaggaatggctgctggaaaacagagaaagctttcggagctttcaggcctcgagcaactcggcgcgtcagatcaagacggccctgcaaggcgccattcaggagatgcttctgaccaagacggcggaggactacctcgtcggaaaggatcccgtctcggacgacgacatccgtcagaaccgcatctacaagattctggaactgaaccactacgacccagcgtacgtggggagtattttggtcgggtggtgccagaagaaatggggcaagcgaaacacgctgtggctgttcggacatgcgaccaccggcaagaccaacatcgcggaggctattgcccatgctgtgccgttctatggatgcgttaactggaccaacgagaactttccgttcaacgactgcgtcgaaaaaatgattatctggtgggaggagggcaaaatgaccgccaaagtggtggaaacagccaaggcgattctgggaggatctcgggtgagagtggaccaaaaatgcaaagcttcggttccgatcgaaccgacgccggtcattattaccagtaacaccaacatgtgttatgtcatcgacgggaacacgaccacgttcgagcataagcagccgttggaggacaggatgtttaagctcgaattgctgactcggttgcctgatgactttggtaaggtgaccaaacaggaggtgcgtcaattcttcaggtggtctcaggatcacctgacccctgtgatcccagaattcctagtgcggaaggcggagtctcgcaaaagacccgccccttccggggaaggctatataagcccgacaaagcggcccgcgctcgcagagcagcagcaggcgtcggagagcgcggacccggttcccaccagattggttggagcggttggtcaaaaagggagtgaatgctgcagctga

SEQ ID NO: 543 - DNA, 1323 bp, Artificial Sequence
  Description of Artificial Sequence: Synthetic polynucleotide
atggagctcgtggattggctcgtggagaaggggatcaccaccgagaaggaatggctgctggaaaacagagaaagctttcggagctttcaggcctcgagcaactcggcgcgtcagatcaagacggccctgcaaggcgccattcaggagatgcttctgaccaagacggcggaggactacctcgtcggaaaggatcccgtctcggacgacgacatccgtcagaaccgcatctacaagattctggaactgaaccactacgacccagcgtacgtggggagtattttggtcgggtggtgccagaagaaatggggcaagcgaaacacgctgtggctgttcggacatgcgaccaccggcaagaccaacatcgcggaggctattgcccatgctgtgccgttctatggatgcgttaactggaccaacgagaactttccgttcaacgactgcgtcgaaaaaatgattatctggtgggaggagggcaaaatgaccgccaaagtggtggaaacagccaaggcgattctgggaggatctcgggtgagagtggaccaaaaatgcaaagcttcggttccgatcgaaccgacgccggtcattattaccagtaacaccaacatgtgttatgtcatcgacgggaacacgaccacgttcgagcataagcagccgttggaggacaggatgtttaagctcgaattgctgactcggttgcctgatgactttggtaaggtgaccaaacaggaggtgcgtcaattcttcaggtggtctcaggatcacctgacccctgtgatcccagaattcctagtgcggaaggcggagtctcgcaaaagacccgccccttccggggaaggctatataagcccgacaaagcggcccgcgctcgcagagcagcagcaggcgtcggagagcgcggacccggttcccaccaggtatcgtatcaaatgctcgaaacattgcggtatggataaaatgttgtttccttgccaaatttgtgaatcgatgaacagagatattaatatttgtgctattcataaaacgaccgactgtaaagagtgtttccccgactacggggataaagatgatgtagaactacccccctgtacagaacacaacgtgtctcgttgttatcaatgtcattcgggcgaattgtatcgcgtgacttcggactctgacgagaaacctgcccccgagagtgatgaaggcaccgagccatcctatgctccctgcacgattcaccacctgatgggcaagagtcacgggttagtcacttgcgcggcgtgtcggttgaaaaatagtacgttgcatgatgacttggatgacggtgatctcgaacaataa

SEQ ID NO: 544 - DNA, 960 bp, Artificial Sequence
  Description of Artificial Sequence: Synthetic polynucleotide
atggagctcgtggattggctcgtggagaaggggatcaccaccgagaaggaatggctgctggaaaacagagaaagctttcggagctttcaggcctcgagcaactcggcgcgtcagatcaagacggccctgcaaggcgccattcaggagatgcttctgaccaagacggcggaggactacctcgtcggaaaggatcccgtctcggacgacgacatccgtcagaaccgcatctacaagattctggaactgaaccactacgacccagcgtacgtggggagtattttggtcgggtggtgccagaagaaatggggcaagcgaaacacgctgtggctgttcggacatgcgaccaccggcaagaccaacatcgcggaggctattgcccatgctgtgccgttctatggatgcgttaactggaccaacgagaactttccgttcaacgactgcgtcgaaaaaatgattatctggtgggaggagggcaaaatgaccgccaaagtggtggaaacagccaaggcgattctgggaggatctcgggtgagagtggaccaaaaatgcaaagcttcggttccgatcgaaccgacgccggtcattattaccagtaacaccaacatgtgttatgtcatcgacgggaacacgaccacgttcgagcataagcagccgttggaggacaggatgtttaagctcgaattgctgactcggttgcctgatgactttggtaaggtgaccaaacaggaggtgcgtcaattcttcaggtggtctcaggatcacctgacccctgtgatcccagaattcctagtgcggaaggcggagtctcgcaaaagacccgccccttccggggaaggctatataagcccgacaaagcggcccgcgctcgcagagcagcagcaggcgtcggagagcgcggacccggttcccaccagattggttggagcggttggtcaaaaagggagtgaatgctgcagctga

SEQ ID NO: 545 - DNA, 1608 bp, Artificial Sequence
  Description of Artificial Sequence: Synthetic polynucleotide
atggctgaaggaggtggcggcccagtgggcgatgcaggccagggtgccgatggagtgggcaattcctccggaaattggcattgcgattcccaatggctggaaaacggagtcgtcactcgaaccacccgaacctgggtcttgcccagctacaacaaccacctgtacaaacgaatccaaggacccagcggaggcgacaacaacaacaaattctttggattcagcaccccctggggatactttgactacaatcgattccactgccacttttccccgcgagactggcaacgactcatcaacaacaactggggcatccgtcccaaagcgatgcgctttagactctttaacatccaggttaaagaggtcacggtccaagacttcaacaccaccatcggcaacaacctcaccagtacggtccaggtctttgcggacaaggactaccaactgccgtacgtcctcggatcggctaccgaaggcaccttcccgccgttcccagcggatatctacacgatcccgcagtacgggtactgcacgctaaactacaacaacgaggcggtggatcgttcggccttctactgtctggactactttccctcagacatgctgcggacaggaaataactttgagtttacttacaccttcgaggacgttcctttccatagcatgtttgcccacaaccagacgctagaccggctgatgaatcccctcgtggatcagtacctctgggctttcagctccgtcagccaagcaggctcatctggacgagctcttcattactcgcgggcgactaaaaccaacatggcggctcaatataggaactggttacctgggcctttcttccgtgatcagcaaatctttacgggcgctagcaacatcactaaaaataacgtctttagcgtttgggaaaaaggcaagcaatgggaactcgacaatcggaccaacctaatgcagcccggtcctgcggcagcgaccacctttagcggagaacctgaccgtcaagccatgcaaaacacgctggcttttagcaggaccgtctacgatcaaacgaccgccacgaccgatcgtaaccagatactcatcaccaacgaagacgaaatcagacccaccaactcggtcggtatcgacgcgtggggagcagttcccaccaacaaccagtcgatcgtgacccccggcactcgcgcggccgtcaacaatcaaggggcgcttcccgggatggtgtggcaaaacagagacatttaccctacagggacccatttggccaaaattcccgacactgacaatcacttccatccgtccccgcttattgggcggtttggctgcaagcatccccctccccagattttcattaaaaacacacccgtccctgccaacccttcggaaacgttccagacggccaaagtggcctccttcatcaaccagtactcgaccggacagtgcaccgtcgaaatcttttgggaactcaagaaggaaacctccaagcgctggaaccccgaaatccagttcacctccaactttggcaacgcggccgacatccagtttgccgtctccgacacgggatcctattccgaacctcgtcccatcggtacccgttaccttaccaaacctctgtaa

SEQ ID NO: 546 - DNA, 2232 bp, Artificial Sequence
  Description of Artificial Sequence: Synthetic polynucleotide
atgtctctcatttctgatgcgattccagattggttggagcggttggtcaaaaagggagtgaatgctgcagctgatttctaccatttggaaagcggtcctcctcgtcctaaggcaaatcagcaaactcaagaatctcttgaaaaggacgattcgagaggtctcgtgttcccaggctacaattatctaggccctttcaacggtctagataaaggagaacccgtcaacgaggcagacgctgccgccttagaacacgacaaggcttacgacctcgaaatcaaggacgggcacaacccgtactttgagtacaacgaggccgacagacgtttccaggaacgtctcaaagacgatacctcctttggaggcaatttaggtaaagccatcttccaggccaaaaagagggttctcgaaccctttggtctggtggaagactcaaagacggctccgaccggagacaagcggaaaggcgaagacgaacctcgtttgcccgacacttcttcacagactcccaagaaaaacaagaagcctcgcaaggaaagaccttccggcggggcagaagatccgggcgaaggcacctcttccaacgctggagcagcagcacccgcctctagtgtgggatcatctatcatggctgaaggaggtggcggcccagtgggcgatgcaggccagggtgccgatggagtgggcaattcctccggaaattggcattgcgattcccaatggctggaaaacggagtcgtcactcgaaccacccgaacctgggtcttgcccagctacaacaaccacctgtacaaacgaatccaaggacccagcggaggcgacaacaacaacaaattctttggattcagcaccccctggggatactttgactacaatcgattccactgccacttttccccgcgagactggcaacgactcatcaacaacaactggggcatccgtcccaaagcgatgcgctttagactctttaacatccaggttaaagaggtcacggtccaagacttcaacaccaccatcggcaacaacctcaccagtacggtccaggtctttgcggacaaggactaccaactgccgtacgtcctcggatcggctaccgaaggcaccttcccgccgttcccagcggatatctacacgatcccgcagtacgggtactgcacgctaaactacaacaacgaggcggtggatcgttcggccttctactgtctggactactttccctcagacatgctgcggacaggaaataactttgagtttacttacaccttcgaggacgttcctttccatagcatgtttgcccacaaccagacgctagaccggctgatgaatcccctcgtggatcagtacctctgggctttcagctccgtcagccaagcaggctcatctggacgagctcttcattactcgcgggcgactaaaaccaacatggcggctcaatataggaactggttacctgggcctttcttccgtgatcagcaaatctttacgggcgctagcaacatcactaaaaataacgtctttagcgtttgggaaaaaggcaagcaatgggaactcgacaatcggaccaacctaatgcagcccggtcctgcggcagcgaccacctttagcggagaacctgaccgtcaagccatgcaaaacacgctggcttttagcaggaccgtctacgatcaaacgaccgccacgaccgatcgtaaccagatactcatcaccaacgaagacgaaatcagacccaccaactcggtcggtatcgacgcgtggggagcagttcccaccaacaaccagtcgatcgtgacccccggcactcgcgcggccgtcaacaatcaaggggcgcttcccgggatggtgtggcaaaacagagacatttaccctacagggacccatttggccaaaattcccgacactgacaatcacttccatccgtccccgcttattgggcggtttggctgcaagcatccccctccccagattttcattaaaaacacacccgtccctgccaacccttcggaaacgttccagacggccaaagtggcctccttcatcaaccagtactcgaccggacagtgcaccgtcgaaatcttttgggaactcaagaaggaaacctccaagcgctggaaccccgaaatccagttcacctccaactttggcaacgcggccgacatccagtttgccgtctccgacacgggatcctattccgaacctcgtcccatcggtacccgttaccttaccaaacctctgtaa

SEQ ID NO: 547 - protein, 535 aa, Artificial Sequence
  Description of Artificial Sequence: Synthetic polypeptide
MAEGGGGPVGDAGQGADGVGNSSGNWHCDSQWLENGVVTRTTRTWVLPSYNNHLYKRIQGPSGGDNNNKFFGFSTPWGYFDYNRFHCHFSPRDWQRLINNNWGIRPKAMRFRLFNIQVKEVTVQDFNTTIGNNLTSTVQVFADKDYQLPYVLGSATEGTFPPFPADIYTIPQYGYCTLNYNNEAVDRSAFYCLDYFPSDMLRTGNNFEFTYTFEDVPFHSMFAHNQTLDRLMNPLVDQYLWAFSSVSQAGSSGRALHYSRATKTNMAAQYRNWLPGPFFRDQQIFTGASNITKNNVFSVWEKGKQWELDNRTNLMQPGPAAATTFSGEPDRQAMQNTLAFSRTVYDQTTATTDRNQILITNEDEIRPTNSVGIDAWGAVPTNNQSIVTPGTRAAVNNQGALPGMVWQNRDIYPTGTHLAKIPDTDNHFHPSPLIGRFGCKHPPPQIFIKNTPVPANPSETFQTAKVASFINQYSTGQCTVEIFWELKKETSKRWNPEIQFTSNFGNAADIQFAVSDTGSYSEPRPIGTRYLTKPL

SEQ ID NO: 548 - protein, 440 aa, Artificial Sequence
  Description of Artificial Sequence: Synthetic polypeptide
MELVDWLVEKGITTEKEWLLENRESFRSFQASSNSARQIKTALQGAIQEMLLTKTAEDYLVGKDPVSDDDIRQNRIYKILELNHYDPAYVGSILVGWCQKKWGKRNTLWLFGHATTGKTNIAEAIAHAVPFYGCVNWTNENFPFNDCVEKMIIWWEEGKMTAKVVETAKAILGGSRVRVDQKCKASVPIEPTPVIITSNTNMCYVIDGNTTTFEHKQPLEDRMFKLELLTRLPDDFGKVTKQEVRQFFRWSQDHLTPVIPEFLVRKAESRKRPAPSGEGYISPTKRPALAEQQQASESADPVPTRYRIKCSKHCGMDKMLFPCQICESMNRDINICAIHKTTDCKECFPDYGDKDDVELPPCTEHNVSRCYQCHSGELYRVTSDSDEKPAPESDEGTEPSYAPCTIHHLMGKSHGLVTCAACRLKNSTLHDDLDDGDLEQ

SEQ ID NO: 549 - protein, 319 aa, Artificial Sequence
  Description of Artificial Sequence: Synthetic polypeptide
MELVDWLVEKGITTEKEWLLENRESFRSFQASSNSARQIKTALQGAIQEMLLTKTAEDYLVGKDPVSDDDIRQNRIYKILELNHYDPAYVGSILVGWCQKKWGKRNTLWLFGHATTGKTNIAEAIAHAVPFYGCVNWTNENFPFNDCVEKMIIWWEEGKMTAKVVETAKAILGGSRVRVDQKCKASVPIEPTPVIITSNTNMCYVIDGNTTTFEHKQPLEDRMFKLELLTRLPDDFGKVTKQEVRQFFRWSQDHLTPVIPEFLVRKAESRKRPAPSGEGYISPTKRPALAEQQQASESADPVPTRLVGAVGQKGSECCS

SEQ ID NO: 550 - protein, 662 aa, Artificial Sequence
  Description of Artificial Sequence: Synthetic polypeptide
MRSYYEVIVQLPNDVESQVPGISDSFVNWITSREWTLPEDADWDLDQVDQVQLTLGDKIQREIRTHWGTMAKEPDFHYFIQLEQGEVFFHLHVLLETCSVKPMVLGRYIRHIQQKIVSKVYCATSLRWKDGCVVTKTKNFGGANKVRAESYIPAYLIPKQQPEVQWAWTNVPEYIKACLHRELRASLARLHFEEAGVSQSKENLARTADGAPVMPTRVSKRYMELVDWLVEKGITTEKEWLLENRESFRSFQASSNSARQIKTALQGAIQEMLLTKTAEDYLVGKDPVSDDDIRQNRIYKILELNHYDPAYVGSILVGWCQKKWGKRNTLWLFGHATTGKTNIAEAIAHAVPFYGCVNWTNENFPFNDCVEKMIIWWEEGKMTAKVVETAKAILGGSRVRVDQKCKASVPIEPTPVIITSNTNMCYVIDGNTTTFEHKQPLEDRMFKLELLTRLPDDFGKVTKQEVRQFFRWSQDHLTPVIPEFLVRKAESRKRPAPSGEGYISPTKRPALAEQQQASESADPVPTRYRIKCSKHCGMDKMLFPCQICESMNRDINICAIHKTTDCKECFPDYGDKDDVELPPCTEHNVSRCYQCHSGELYRVTSDSDEKPAPESDEGTEPSYAPCTIHHLMGKSHGLVTCAACRLKNSTLHDDLDDGDLEQ

SEQ ID NO: 551 - protein, 541 aa, Artificial Sequence
  Description of Artificial Sequence: Synthetic polypeptide
MRSYYEVIVQLPNDVESQVPGISDSFVNWITSREWTLPEDADWDLDQVDQVQLTLGDKIQREIRTHWGTMAKEPDFHYFIQLEQGEVFFHLHVLLETCSVKPMVLGRYIRHIQQKIVSKVYCATSLRWKDGCVVTKTKNFGGANKVRAESYIPAYLIPKQQPEVQWAWTNVPEYIKACLHRELRASLARLHFEEAGVSQSKENLARTADGAPVMPTRVSKRYMELVDWLVEKGITTEKEWLLENRESFRSFQASSNSARQIKTALQGAIQEMLLTKTAEDYLVGKDPVSDDDIRQNRIYKILELNHYDPAYVGSILVGWCQKKWGKRNTLWLFGHATTGKTNIAEAIAHAVPFYGCVNWTNENFPFNDCVEKMIIWWEEGKMTAKVVETAKAILGGSRVRVDQKCKASVPIEPTPVIITSNTNMCYVIDGNTTTFEHKQPLEDRMFKLELLTRLPDDFGKVTKQEVRQFFRWSQDHLTPVIPEFLVRKAESRKRPAPSGEGYISPTKRPALAEQQQASESADPVPTRLVGAVGQKGSECCS

SEQ ID NO: 552 - protein, 743 aa, Artificial Sequence
  Description of Artificial Sequence: Synthetic polypeptide
MSLISDAIPDWLERLVKKGVNAAADFYHLESGPPRPKANQQTQESLEKDDSRGLVFPGYNYLGPFNGLDKGEPVNEADAAALEHDKAYDLEIKDGHNPYFEYNEADRRFQERLKDDTSFGGNLGKAIFQAKKRVLEPFGLVEDSKTAPTGDKRKGEDEPRLPDTSSQTPKKNKKPRKERPSGGAEDPGEGTSSNAGAAAPASSVGSSIMAEGGGGPVGDAGQGADGVGNSSGNWHCDSQWLENGVVTRTTRTWVLPSYNNHLYKRIQGPSGGDNNNKFFGFSTPWGYFDYNRFHCHFSPRDWQRLINNNWGIRPKAMRFRLFNIQVKEVTVQDFNTTIGNNLTSTVQVFADKDYQLPYVLGSATEGTFPPFPADIYTIPQYGYCTLNYNNEAVDRSAFYCLDYFPSDMLRTGNNFEFTYTFEDVPFHSMFAHNQTLDRLMNPLVDQYLWAFSSVSQAGSSGRALHYSRATKTNMAAQYRNWLPGPFFRDQQIFTGASNITKNNVFSVWEKGKQWELDNRTNLMQPGPAAATTFSGEPDRQAMQNTLAFSRTVYDQTTATTDRNQILITNEDEIRPTNSVGIDAWGAVPTNNQSIVTPGTRAAVNNQGALPGMVWQNRDIYPTGTHLAKIPDTDNHFHPSPLIGRFGCKHPPPQIFIKNTPVPANPSETFQTAKVASFINQYSTGQCTVEIFWELKKETSKRWNPEIQFTSNFGNAADIQFAVSDTGSYSEPRPIGTRYLTKPL

SEQ ID NO: 553 - protein, 598 aa, Artificial Sequence
  Description of Artificial Sequence: Synthetic polypeptide
TAPTGDKRKGEDEPRLPDTSSQTPKKNKKPRKERPSGGAEDPGEGTSSNAGAAAPASSVGSSIMAEGGGGPVGDAGQGADGVGNSSGNWHCDSQWLENGVVTRTTRTWVLPSYNNHLYKRIQGPSGGDNNNKFFGFSTPWGYFDYNRFHCHFSPRDWQRLINNNWGIRPKAMRFRLFNIQVKEVTVQDFNTTIGNNLTSTVQVFADKDYQLPYVLGSATEGTFPPFPADIYTIPQYGYCTLNYNNEAVDRSAFYCLDYFPSDMLRTGNNFEFTYTFEDVPFHSMFAHNQTLDRLMNPLVDQYLWAFSSVSQAGSSGRALHYSRATKTNMAAQYRNWLPGPFFRDQQIFTGASNITKNNVFSVWEKGKQWELDNRTNLMQPGPAAATTFSGEPDRQAMQNTLAFSRTVYDQTTATTDRNQILITNEDEIRPTNSVGIDAWGAVPTNNQSIVTPGTRAAVNNQGALPGMVWQNRDIYPTGTHLAKIPDTDNHFHPSPLIGRFGCKHPPPQIFIKNTPVPANPSETFQTAKVASFINQYSTGQCTVEIFWELKKETSKRWNPEIQFTSNFGNAADIQFAVSDTGSYSEPRPIGTRYLTKPL

SEQ ID NO: 554 - DNA, 4694 bp, Artificial Sequence
  Description of Artificial Sequence: Synthetic polynucleotide
tggccagtttccaagacaggctcgctcgctcactcgggccggggccccaaaggggcccctagcgaccgcttcgcggtcgcggcccgagtgagcgagcgagcctgtcttggaaactggccagcactccggtgaggtaatgccgtcacgtggtcgggaatgggaacgggaaatctcgcgagaacgtaaacaaatataagacggcgccacacggcgctgcgtcatacgcgcgcgcgcaccggcgagatgaggtcgtactacgaggtcatcgttcagctgcccaacgacgtcgagagtcaggtacctggaatctccgattcgttcgtcaactggattacgtcgcgagaatggacgttgcctgaggacgccgattgggatttggaccaggtcgatcaagttcaactgacgctcggcgacaaaatccaacgggagattcgaactcattgggggacgatggccaaagaaccggactttcactattttatccaactggaacaaggtgaggtgttctttcatttacacgtcctgctggaaacgtgttccgtaaagccgatggtactcggaagatatatccgacatattcaacaaaaaattgtgagtaaagtctactgcgccacgagcctacgatggaaggatggatgcgtggtgaccaagaccaaaaatttcgggggcgcgaacaaggtccgggccgagtcgtatattcccgcctacctgatcccgaaacagcaaccggaagtgcagtgggcgtggactaacgtgcccgagtatataaaagcgtgcttgcaccgagaactgcgtgccagtctcgcgcgacttcacttcgaggaggcgggcgtctcgcaatccaaggaaaatctcgcgagaactgcagacggcgctcccgtgatgccgacccgcgtcagcaaacgctacatggagctcgtggattggctcgtggagaaggggatcaccaccgagaaggaatggctgctggaaaacagagaaagctttcggagctttcaggcctcgagcaactcggcgcgtcagatcaagacggccctgcaaggcgccattcaggagatgcttctgaccaagacggcggaggactacctcgtcggaaaggatcccgtctcggacgacgacatccgtcagaaccgcatctacaagattctggaactgaaccactacgacccagcgtacgtggggagtattttggtcgggtggtgccagaagaaatggggcaagcgaaacacgctgtggctgttcggacatgcgaccaccggcaagaccaacatcgcggaggctattgcccatgctgtgccgttctatggatgcgttaactggaccaacgagaactttccgttcaacgactgcgtcgaaaaaatgattatctggtgggaggagggcaaaatgaccgccaaagtggtggaaacagccaaggcgattctgggaggatctcgggtgagagtggaccaaaaatgcaaagcttcggttccgatcgaaccgacgccggtcattattaccagtaacaccaacatgtgttatgtcatcgacgggaacacgaccacgttcgagcataagcagccgttggaggacaggatgtttaagctcgaattgctgactcggttgcctgatgactttggtaaggtgaccaaacaggaggtgcgtcaattcttcaggtggtctcaggatcacctgacccctgtgatcccagaattcctagtgcggaaggcggagtctcgcaaaagacccgccccttccggggaaggctatataagcccgacaaagcggcccgcgctcgcagagcagcagcaggcgtcggagagcgcggacccggttcccaccaggtatcgtatcaaatgctcgaaacattgcggtatggataaaatgttgtttccttgccaaatttgtgaatcgatgaacagagatattaatatttgtgctattcataaaacgaccgactgtaaagagtgtttccccgactacggggataaagatgatgtagaactacccccctgtacagaacacaacgtgtctcgttgttatcaatgtcattcgggcgaattgtatcgcgtgacttcggactctgacgagaaacctgcccccgagagtgatgaaggcaccgagccatcctatgctccctgcacgattcaccacctgatgggcaagagtcacgggttagtcacttgcgcggcgtgtcggttgaaaaatagtacgttgcatgatgacttggatgacggtgatctcgaacaataaatgattgaaatgtagccatgtctctcatttctgatgcgattccagattggttggagcggttggtcaaaaagggagtgaatgctgcagctgatttctaccatttggaaagcggtcctcctcgtcctaaggcaaatcagcaaactcaagaatctcttgaaaaggacgattcgagaggtctcgtgttcccaggctacaattatctaggccctttcaacggtctagataaaggagaacccgtcaacgaggcagacgctgccgccttagaacacgacaaggcttacgacctcgaaatcaaggacgggcacaacccgtactttgagtacaacgaggccgacagacgtttccaggaacgtctcaaagacgatacctcctttggaggcaatttaggtaaagccatcttccaggccaaaaagagggttctcgaaccctttggtctggtggaagactcaaagacggctccgaccggagacaagcggaaaggcgaagacgaacctcgtttgcccgacacttcttcacagactcccaagaaaaacaagaagcctcgcaaggaaagaccttccggcggggcagaagatccgggcgaaggcacctcttccaacgctggagcagcagcacccgcctctagtgtgggatcatctatcatggctgaaggaggtggcggcccagtgggcgatgcaggccagggtgccgatggagtgggcaattcctccggaaattggcattgcgattcccaatggctggaaaacggagtcgtcactcgaaccacccgaacctgggtcttgcccagctacaacaaccacctgtacaaacgaatccaaggacccagcggaggcgacaacaacaacaaattctttggattcagcaccccctggggatactttgactacaatcgattccactgccacttttccccgcgagactggcaacgactcatcaacaacaactggggcatccgtcccaaagcgatgcgctttagactctttaacatccaggttaaagaggtcacggtccaagacttcaacaccaccatcggcaacaacctcaccagtacggtccaggtctttgcggacaaggactaccaactgccgtacgtcctcggatcggctaccgaaggcaccttcccgccgttcccagcggatatctacacgatcccgcagtacgggtactgcacgctaaactacaacaacgaggcggtggatcgttcggccttctactgtctggactactttccctcagacatgctgcggacaggaaataactttgagtttacttacaccttcgaggacgttcctttccatagcatgtttgcccacaaccagacgctagaccggctgatgaatcccctcgtggatcagtacctctgggctttcagctccgtcagccaagcaggctcatctggacgagctcttcattactcgcgggcgactaaaaccaacatggcggctcaatataggaactggttacctgggcctttcttccgtgatcagcaaatctttacgggcgctagcaacatcactaaaaataacgtctttagcgtttgggaaaaaggcaagcaatgggaactcgacaatcggaccaacctaatgcagcccggtcctgcggcagcgaccacctttagcggagaacctgaccgtcaagccatgcaaaacacgctggcttttagcaggaccgtctacgatcaaacgaccgccacgaccgatcgtaaccagatactcatcaccaacgaagacgaaatcagacccaccaactcggtcggtatcgacgcgtggggagcagttcccaccaacaaccagtcgatcgtgacccccggcactcgcgcggccgtcaacaatcaaggggcgcttcccgggatggtgtggcaaaacagagacatttaccctacagggacccatttggccaaaattcccgacactgacaatcacttccatccgtccccgcttattgggcggtttggctgcaagcatccccctccccagattttcattaaaaacacacccgtccctgccaacccttcggaaacgttccagacggccaaagtggcctccttcatcaaccagtactcgaccggacagtgcaccgtcgaaatcttttgggaactcaagaaggaaacctccaagcgctggaaccccgaaatccagttcacctccaactttggcaacgcggccgacatccagtttgccgtctccgacacgggatcctattccgaacctcgtcccatcggtacccgttaccttaccaaacctctgtaaattaaacccttcaataaaccgtttatgcgtaactgtatttccgtctcctgtcgttattcagtcacatgatgcggcattacctcaccggagtgctggccagtttccaagacaggctcgctcgctcactcgggccggggccccaaaggggcccctagcgaccgcttcgcggtcgcggcccgagtgagcgagcgagcctgtcttggaaactggcca

SEQ ID NO: 555 - DNA, 2211 bp, Artificial Sequence
  Description of Artificial Sequence: Synthetic polynucleotide
atggctgctgatggttatcttccagattggctcgaggacactctctctgaaggaataagacagtggtggaagctcaaacctggcccaccaccaccaaagcccgcagagcggcataaggacgacagcaggggtcttgtgcttcctgggtacaagtacctcggacccttcaacggactcgacaagggagagccggtcaacgaggcagacgcagcggccctcgagcacgacaaggcctacgaccagcagctcaaggccggtgacaacccctacctcaagtacaaccacgccgacgcggagttccagcagcggcttcagggcgacacatcgtttgggggcaacctcggcagagcagtcttccaggccaaaaagagggttcttgaacctcttggtctggttgagcaagcgggtgagacggctcctggaaagaagagaccgttgattgaatccccccagcagcccgactcctccacgggtatcggcaaaaaaggcaagcagccggctaaaaagagactcaattttggtcagactggcgactcagagtcagtccccgacccacaacctctcggagaacctccagcaacccccgctgctgtgggacctactacaatggcttcaggtggtggcgcaccaatggcagacaataacgaaggcgccgacggagtgggtaatgcctcaggaaattggcattgcgattccacatggctgggcgacagagtcatcaccaccagcacccgcacctgggccttgcccacctacaataaccacctctacaagcaaatctccagtgcttcaacgggggccagcaacgacaaccactacttcggctacagcaccccctgggggtattttgacttcaacagattccactgccacttttcaccacgtgactggcagcgactcatcaacaacaattggggattccggcccaagagactcaacttcaaactcttcaacatccaagtcaaggaggtcacgacgaatgatggcgtcacaaccatcgctaataaccttaccagcacggttcaagtcttctcggactcagactatcagctcccgtacgtgctcgggtcggctcacgagggctgcctcccgccgttcccagcagacgtcttcatggtgccacagtatggatacctcaccctgaacaacgggagtcaggcagtaggacgctcttcattttactgcctggagtactttccttctcagatgctgcgtaccggaaacaactttaccttcagctacacttttgaggacgttcctttccacagcagctacgctcacagccagagtctggaccgtctcatgaatcctctcatcgaccagtacctgtattacctgaacagaactcagaatcagtccggaagtgcccaaaacaaggacttgctgtttagccgggggtctccagctggcatgtctgttcagcccaaaaactggctacctggaccctgttatcggcagcagcgcgtttctaaaacaaaaacagacaacaacaacagcaactttacctggactggtgcttcaaaatataaccttaatgggcgtgaatctataatcaaccctggcactgctatggcctcacacaaagacgacaaagacaagttctttcccatgagcggtgtcatgatttttggaaaggagagcgccggagcttcaaacactgcattggacaatgtcatgatcacagacgaagaggaaatcaaagccactaaccccgtggccaccgaaagatttgggactgtggcagtcaatctccagagcagcagcacagaccctgcgaccggagatgtgcatgttatgggagccttacctggaatggtgtggcaagacagagacgtatacctgcagggtcccatttgggccaaaattcctcacacagatggacactttcacccgtctcctcttatgggcggctttggactcaagaacccgcctcctcagatcctcatcaaaaacacgcctgttcctgcgaatcctccggcggagttttcagctacaaagtttgcttcattcatcacccaatactccacaggacaagtgagtgtggaaattgaatgggagctgcagaaagaaaacagcaagcgctggaatcccgaagtgcagtacacatccaattatgcaaaatctgccaacgttgattttactgtggacaacaatggactttatactgagcctcgccccattggcacccgttacctcacccgtcccctgtaa

SEQ ID NO: 556 - protein, 736 aa, Artificial Sequence
  Description of Artificial Sequence: Synthetic polypeptide
MAADGYLPDWLEDTLSEGIRQWWKLKPGPPPPKPAERHKDDSRGLVLPGYKYLGPFNGLDKGEPVNEADAAALEHDKAYDQQLKAGDNPYLKYNHADAEFQQRLQGDTSFGGNLGRAVFQAKKRVLEPLGLVEQAGETAPGKKRPLIESPQQPDSSTGIGKKGKQPAKKRLNFGQTGDSESVPDPQPLGEPPATPAAVGPTTMASGGGAPMADNNEGADGVGNASGNWHCDSTWLGDRVITTSTRTWALPTYNNHLYKQISSASTGASNDNHYFGYSTPWGYFDFNRFHCHFSPRDWQRLINNNWGFRPKRLNFKLFNIQVKEVTTNDGVTTIANNLTSTVQVFSDSDYQLPYVLGSAHEGCLPPFPADVFMVPQYGYLTLNNGSQAVGRSSFYCLEYFPSQMLRTGNNFTFSYTFEDVPFHSSYAHSQSLDRLMNPLIDQYLYYLNRTQNQSGSAQNKDLLFSRGSPAGMSVQPKNWLPGPCYRQQRVSKTKTDNNNSNFTWTGASKYNLNGRESIINPGTAMASHKDDKDKFFPMSGVMIFGKESAGASNTALDNVMITDEEEIKATNPVATERFGTVAVNLQSSSTDPATGDVHVMGALPGMVWQDRDVYLQGPIWAKIPHTDGHFHPSPLMGGFGLKNPPPQILIKNTPVPANPPAEFSATKFASFITQYSTGQVSVEIEWELQKENSKRWNPEVQYTSNYAKSANVDFTVDNNGLYTEPRPIGTRYLTRPL

SEQ ID NO: 557 - DNA, 2211 bp, Artificial Sequence
  Description of Artificial Sequence: Synthetic polynucleotide
atggcttccgatggttatcttccagattggctcgaggacaacctctctgagggcatccgcgagtggtgggacttgaaacctggagccccgaaacccaaagccaaccagcaaaagcaggacgacggccggggtctggtgcttcctggctacaagtacctcggacccttcaacggactcgacaagggggagcccgtcaacgcggcggatgcagcggccctcgagcacgacaaggcctacgaccagcagctcagagcgggtgacaatccgtacctgcggtataaccacgccgacgccgagtttcaggagcgtctgcaagaagatacgtcttttgggggcaacctcgggcgagcagtcttccaggccaagaagagggttctcgaaccttttggtctggttgaggaaggtgctaagacggctcctggaaagaaacgtccggtagagcagtcgccacaagagccagactcctcctcgggcattggcaagacaggccagcagcccgctaaaaagagactcaattttggtcagactggcgactcagagtcagtccccgacccacaacctctcggagaacctccagcaacccccgctgctgtgggacctactacaatggcttcaggcggtggcgcaccaatggcagacaataacgaaggcgccgacggagtgggtaatgcctcaggaaattggcattgcgattccacatggctgggcgacagagtcatcaccaccagcacccgaacatgggccttgcccacctataacaaccacctctacaagcaaatctccagtgcttcaacgggggccagcaacgacaaccactacttcggctacagcaccccctgggggtattttgatttcaacagattccactgccatttctcaccacgtgactggcagcgactcatcaacaacaattggggattccggcccaagagactcaacttcaaactcttcaacatccaagtcaaggaggtcacgacgaatgatggcgtcacaaccatcgctaataaccttaccagcacggttcaagtcttctcggactcggagtaccagcttccgtacgtcctcggctctgcgcaccagggctgcctccctccgttcccggcggacgtgttcatgattccgcagtacggctacctaacgctcaacaatggcagccaggcagtgggacggtcatccttttactgcctggaatatttcccatcgcagatgctgagaacgggcaataactttaccttcagctacaccttcgaggacgtgcctttccacagcagctacgcgcacagccagagcctggaccggctgatgaatcctctcatcgaccagtacctgtattacctgaacagaactcagaatcagtccggaagtgcccaaaacaaggacttgctgtttagccgggggtctccagctggcatgtctgttcagcccaaaaactggctacctggaccctgttaccggcagcagcgcgtttctaaaacaaaaacagacaacaacaacagcaactttacctggactggtgcttcaaaatataaccttaatgggcgtgaatctataatcaaccctggcactgctatggcctcacacaaagacgacaaagacaagttctttcccatgagcggtgtcatgatttttggaaaggagagcgccggagcttcaaacactgcattggacaatgtcatgatcacagacgaagaggaaatcaaagccactaaccccgtggccaccgaaagatttgggactgtggcagtcaatctccagagcagcagcacagaccctgcgaccggagatgtgcatgttatgggagccttacctggaatggtgtggcaagacagagacgtatacctgcagggtcccatttgggccaaaattcctcacacagatggacactttcacccgtctcctcttatgggcggctttggacttaagcacccgcctcctcagatcctcatcaaaaacacgcctgttcctgcgaatcctccggcagagttttcggctacaaagtttgcttcattcatcacccagtattctactggccaagtcagcgtggagattgaatgggagctgcagaaagaaaacagcaaacgctggaatcccgaagtgcagtatacatctaactatgcaaaatctgccaacgttgatttcactgtggacaacaatggactttatactgagcctcgtcccattggcacccgttacctcacccgtcccctgtaa

SEQ ID NO: 558 - protein, 736 aa, Artificial Sequence
  Description of Artificial Sequence: Synthetic polypeptide
MASDGYLPDWLEDNLSEGIREWWDLKPGAPKPKANQQKQDDGRGLVLPGYKYLGPFNGLDKGEPVNAADAAALEHDKAYDQQLRAGDNPYLRYNHADAEFQERLQEDTSFGGNLGRAVFQAKKRVLEPFGLVEEGAKTAPGKKRPVEQSPQEPDSSSGIGKTGQQPAKKRLNFGQTGDSESVPDPQPLGEPPATPAAVGPTTMASGGGAPMADNNEGADGVGNASGNWHCDSTWLGDRVITTSTRTWALPTYNNHLYKQISSASTGASNDNHYFGYSTPWGYFDFNRFHCHFSPRDWQRLINNNWGFRPKRLNFKLFNIQVKEVTTNDGVTTIANNLTSTVQVFSDSEYQLPYVLGSAHQGCLPPFPADVFMIPQYGYLTLNNGSQAVGRSSFYCLEYFPSQMLRTGNNFTFSYTFEDVPFHSSYAHSQSLDRLMNPLIDQYLYYLNRTQNQSGSAQNKDLLFSRGSPAGMSVQPKNWLPGPCYRQQRVSKTKTDNNNSNFTWTGASKYNLNGRESIINPGTAMASHKDDKDKFFPMSGVMIFGKESAGASNTALDNVMITDEEEIKATNPVATERFGTVAVNLQSSSTDPATGDVHVMGALPGMVWQDRDVYLQGPIWAKIPHTDGHFHPSPLMGGFGLKHPPPQILIKNTPVPANPPAEFSATKFASFITQYSTGQVSVEIEWELQKENSKRWNPEVQYTSNYAKSANVDFTVDNNGLYTEPRPIGTRYLTRPL

SEQ ID NO: 559 - DNA, 2211 bp, Artificial Sequence
  Description of Artificial Sequence: Synthetic polynucleotide
atggctgctgatggttatcttccagattggctcgaggacactctctctgaaggaataagacagtggtggaagctcaaacctggcccaccaccaccaaagcccgcagagcggcataaggacgacagcaggggtcttgtgcttcctgggtacaagtacctcggacccttcaacggactcgacaagggagagccggtcaacgaggcagacgcagcggccctcgagcacgacaaggcctacgaccagcagctcaaggccggtgacaacccctacctcaagtacaaccacgccgacgcggagttccagcagcggcttcagggcgacacatcgtttgggggcaacctcggcagagcagtcttccaggccaaaaagagggttcttgaacctcttggtctggttgagcaagcgggtgagacggctcctggaaagaagagaccgttgattgaatccccccagcagcccgactcctccacgggtatcggcaaaaaaggcaagcagccggctaaaaagagactcaattttggtcagactggcgactcagagtcagtccccgacccacaacctctcggagaacctccagcaacccccgctgctgtgggacctactacaatggcttcaggtggtggcgcaccaatggcagacaataacgaaggcgccgacggagtgggtaatgcctcaggaaattggcattgcgattccacatggctgggcgacagagtcatcaccaccagcacccgcacctgggccttgcccacctacaataaccacctctacaagcaaatctccagtgcttcaacgggggccagcaacgacaaccactacttcggctacagcaccccctgggggtattttgacttcaacagattccactgccacttttcaccacgtgactggcagcgactcatcaacaacaattggggattccggcccaagagactcaacttcaaactcttcaacatccaagtcaaggaggtcacgacgaatgatggcgtcacaaccatcgctaataaccttaccagcacggttcaagtcttctcggactcagactatcagctcccgtacgtgctcgggtcggctcacgagggctgcctcccgccgttcccagcagacgtcttcatggtgccacagtatggatacctcaccctgaacaacgggagtcaggcagtaggacgctcttcattttactgcctggagtactttccttctcagatgctgcgtaccggaaacaactttaccttcagctacacttttgaggacgttcctttccacagcagctacgctcacagccagagtctggaccgtctcatgaatcctctcatcgaccagtacctgtattacctgaacagaactcagaatcagtccggaagtgcccaaaacaaggacttgctgtttagccgggggtctccaactggcatgtctgttcagcccaaaaactggctacctggaccctgttatcggcagcagcgcgtttctaaaacaaaaacagacaacaacaacagcaactttacctggactggtgcttcaaaatataaccttaatgggcgtgaatctataatcaaccctggcactgctatggcctcacacaaagacgacaaagacaagttctttcccatgagcggtgtcatgatttttggaaaggagagcgccggagcttcaaacactgcattggacaatgtcatgatcacagacgaagaggaaatcaaagccactaaccccgtggccactgaaagatttgggactgtggcagtcaatctccagagcagcagcacagaccctgcgaccggagatgtgcatgccatgggagccttacctggaatggtgtggcaagacagagacgtatacctgcagggtcctatttgggccaaaattcctcacacggatggacactttcacccgtctcctctcatgggcggctttggactcaagaacccgcctcctcagatcctcatcaaaaacacgcctgttcctgcgaatcctccggcggagttttcagctacaaagtttgcttcattcatcacccagtattccacaggacaagtgagcgtggagattgaatgggagctgcagaaagaaaacagcaaacgctggaatcccgaagtgcagtatacatctaactatgcaaaatctgccaacgttgatttcactgtggacaacaatggactttatactgagcctcgccccattggcacccgttacctcacccgtcccctgtaa

SEQ ID NO: 560 - protein, 736 aa, Artificial Sequence
  Description of Artificial Sequence: Synthetic polypeptide
MAADGYLPDWLEDTLSEGIRQWWKLKPGPPPPKPAERHKDDSRGLVLPGYKYLGPFNGLDKGEPVNEADAAALEHDKAYDQQLKAGDNPYLKYNHADAEFQQRLQGDTSFGGNLGRAVFQAKKRVLEPLGLVEQAGETAPGKKRPLIESPQQPDSSTGIGKKGKQPAKKRLNFGQTGDSESVPDPQPLGEPPATPAAVGPTTMASGGGAPMADNNEGADGVGNASGNWHCDSTWLGDRVITTSTRTWALPTYNNHLYKQISSASTGASNDNHYFGYSTPWGYFDFNRFHCHFSPRDWQRLINNNWGFRPKRLNFKLFNIQVKEVTTNDGVTTIANNLTSTVQVFSDSDYQLPYVLGSAHEGCLPPFPADVFMVPQYGYLTLNNGSQAVGRSSFYCLEYFPSQMLRTGNNFTFSYTFEDVPFHSSYAHSQSLDRLMNPLIDQYLYYLNRTQNQSGSAQNKDLLFSRGSPTGMSVQPKNWLPGPCYRQQRVSKTKTDNNNSNFTWTGASKYNLNGRESIINPGTAMASHKDDKDKFFPMSGVMIFGKESAGASNTALDNVMITDEEEIKATNPVATERFGTVAVNLQSSSTDPATGDVHAMGALPGMVWQDRDVYLQGPIWAKIPHTDGHFHPSPLMGGFGLKNPPPQILIKNTPVPANPPAEFSATKFASFITQYSTGQVSVEIEWELQKENSKRWNPEVQYTSNYAKSANVDFTVDNNGLYTEPRPIGTRYLTRPL

SEQ ID NO: 561 - DNA, 2211 bp, Artificial Sequence
  Description of Artificial Sequence: Synthetic polynucleotide
atggctgccgatggttatcttccagattggctcgaggacaacctctctgagggcattcgcgagtggtgggcgctgaaacctggagccccgaagcccaaagccaaccagcaaaagcaggacgacggccggggtctggtgcttcctggctacaagtacctcggacccttcaacggactcgacaagggggagcccgtcaacgcggcggatgcagcggccctcgagcacgacaaggcctacgaccagcagctcaaagcgggtgacaatccgtacctgcggtataaccacgccgacgccgagtttcaggagcgtctgcaagaagatacgtcttttgggggcaacctcgggcgagcagtcttccaggccaagaagcgggttctcgaacctctcggtctggttgaggaaggcgctaagacggctcctggaaagaaacgtccggtagagcaatcgccacaagagccagactcctcctcgggcatcggcaagacaggccagcagcccgctaaaaagagactcaattttggtcagactggcgactcagagtcagtccccgacccacaacctctcggagaacctccagcaacccccgctgctgtgggacctactacaatggcttcaggcggtggcgcaccaatggcagacaataacgaaggcgccgacggagtgggtaatgcctcaggaaattggcattgcgattccacatggctgggcgacagagtcatcaccaccagcacccgaacatgggccttgcccacctataacaaccacctctacaagcaaatctccagtgcttcgacgggggccagcaacgacaaccactacttcggctacagcaccccctgggggtattttgactttaacagattccactgccacttttcaccacgtgactggcagcgactcatcaacaacaactggggattccggcccaagagactcagcttcaagctcttcaacatccaggtcaaggaggtcacgacgaatgatggcgtcacaaccatcgctaataaccttaccagcacggttcaagtcttctcggactcggagtaccagcttccgtacgtcctcggctctgcgcaccagggctgcctccctccgttcccggcggacgtgttcatgattccgcaatacggctacctgacgctcaacaatggcagccaagccgtgggacgttcatccttttactgcctggaatatttcccttctcagatgctgagaacgggcaacaactttaccttcagctacacctttgaggaagtgcctttccacagcagctacgcgcacagccagagcctggaccggctgatgaatcctctcatcgatcaatacctgtattacctgaacagaactcaaaatcagtccggaagtgcccaaaacaaggacttgctgtttagccgtgggtctccagctggcatgtctgttcagcccaaaaactggctacctggaccctgttatcggcagcagcgcgtttctaaaacaaaaacagacaacaacaacagcaattttacctggactggtgcttcaaaatataacctcaatgggcgtgaatccatcatcaaccctggcactgctatggcctcacataaagacgacgaagacaagttctttcccatgagcggtgtcatgatttttggaaaagagagcgccggagcttcaaacactgcattggacaatgtcatgattacagacgaagaggaaattaaagccactaaccctgtggccaccgaaagatttgggaccgtggcagtcaatttccagagcagcagcacagaccctgcgaccggagatgtgcatgctatgggagcattacctggcatggtgtggcaagatagagacgtgtacctgcagggtcccatttgggccaaaattcctcacacagatggacactttcacccgtctcctcttatgggcggctttggactcaagaacccgcctcctcagatcctcatcaaaaacacgcctgttcctgcgaatcctccggcggagttttcagctacaaagtttgcttcattcatcacccaatactccacaggacaagtgagcgtggagattgaatgggagctgcagaaagaaaacagcaaacgctggaatcccgaagtgcagtatacatctaactatgcaaaatctgccaacattgatttcactgtggacaacaatggactttatactgagcctcgccccattggcacccgttacctcacccgtccccagtaa

SEQ ID NO: 562 - protein, 736 aa, Artificial Sequence
  Description of Artificial Sequence: Synthetic polypeptide
MAADGYLPDWLEDNLSEGIREWWALKPGAPKPKANQQKQDDGRGLVLPGYKYLGPFNGLDKGEPVNAADAAALEHDKAYDQQLKAGDNPYLRYNHADAEFQERLQEDTSFGGNLGRAVFQAKKRVLEPLGLVEEGAKTAPGKKRPVEQSPQEPDSSSGIGKTGQQPAKKRLNFGQTGDSESVPDPQPLGEPPATPAAVGPTTMASGGGAPMADNNEGADGVGNASGNWHCDSTWLGDRVITTSTRTWALPTYNNHLYKQISSASTGASNDNHYFGYSTPWGYFDFNRFHCHFSPRDWQRLINNNWGFRPKRLSFKLFNIQVKEVTTNDGVTTIANNLTSTVQVFSDSEYQLPYVLGSAHQGCLPPFPADVFMIPQYGYLTLNNGSQAVGRSSFYCLEYFPSQMLRTGNNFTFSYTFEEVPFHSSYAHSQSLDRLMNPLIDQYLYYLNRTQNQSGSAQNKDLLFSRGSPAGMSVQPKNWLPGPCYRQQRVSKTKTDNNNSNFTWTGASKYNLNGRESIINPGTAMASHKDDEDKFFPMSGVMIFGKESAGASNTALDNVMITDEEEIKATNPVATERFGTVAVNFQSSSTDPATGDVHAMGALPGMVWQDRDVYLQGPIWAKIPHTDGHFHPSPLMGGFGLKNPPPQILIKNTPVPANPPAEFSATKFASFITQYSTGQVSVEIEWELQKENSKRWNPEVQYTSNYAKSANIDFTVDNNGLYTEPRPIGTRYLTRPQ

SEQ ID NO: 563 - DNA, 2211 bp, Artificial Sequence
  Description of Artificial Sequence: Synthetic polynucleotide
atggctgccgatggttatcttccagattggctcgaggacaacctctctgagggcattcgcgagtggtgggacttgaaacctggagccccgaaacccaaagccaaccagcaaaagcaggacgacggccggggtctggtgcttcctggctacaagtacctcggacccttcaacggactcgacaagggggagcccgtcaacgcggcggatgcagcggccctcgagcacgacaaggcctacgaccagcagctcaaagcgggtgacaatccgtaccttcggtataaccacgccgacgccgagtttcaggagcgtctgcaagaagatacgtcttttgggggcaacctcgggcgagcagtcttccaggccaaaaagagggttctcgaacctctcggtctggttgaggaagcggctaagacggctcctggaaagaaacgtccggtagagcagtcgccacaagagccagactcctcctcgggcattggcaagacaggccagcagcccgctaaaaagagactcaattttggtcagactggcgactcagagtcagtccccgacccacaacctctcggagaacctcccgcagccccctcaggtgtgggatctcttacaatggcttcaggtggtggcgcaccaatggcagacaataacgaaggcgccgacggagtgggtaatgcctcaggaaattggcattgcgattccacatggctgggcgacagagtcatcaccaccagcacccgcacctgggccttgcccacctacaataaccacctctacaagcaaatctccagtgcttcaacgggggccagcaacgacaaccactacttcggctacagcaccccctgggggtattttgacttcaacagattccactgccacttttcaccacgtgactggcaaagactcatcaacaacaattggggattccggcccaagagactcaacttcaagctcttcaacatccaagtcaaggaggtcacgacgaatgatggcgtcacgaccatcgctaataaccttaccagcacggttcaagtcttctcggactcggagtaccagttgccgtacgtcctcggctctgcgcaccagggctgcctccctccgttcccggcggacgtgttcatgattccgcagtacggctacctaacgctcaacaatggcagccaggcagtgggacggtcatccttttactgcctggaatatttcccatcgcagatgctgagaacgggcaacaactttaccttcagctacacctttgaggaagtgcctttccacagcagctacgcgcacagccagagcctggaccggctgatgaatcctctcatcgaccagtacctgtattacctgaacagaactcaaaatcagtccggaagtgcccaaaacaaggacttgctgtttagccgtgggtctccagctggcatgtctgttcagcccaaaaactggctacctggaccctgttaccggcagcagtgcgtttctaaaacaaaaacagacaacaacaacagcaactttacctggactggtgcttcaaaatataaccttaatgggcgtgaatctataatcaaccctggcactgctatggcctcacacaaagacgacaaagacaagttctttcccatgagcggtgtcatgatttttggaaaggagagcgccggagcttcaaacactgcattggacaatgtcatgatcacagacgaagaggaaatcaaagccactaaccccgtggccaccgaaagatttgggactgtggcagtcaatctccagagcagcagcacagaccctgcgaccggagatgtgcatgttatgggagccttacctggaatggtgtggcaagacagagacgtatacctgcagggtcctatttgggccaaaattcctcacacagatggacactttcacccgtctcctcttatgggcggctttggactcaagaacccgcctcctcagatcctcatcaaaaacacgcctgttcctgcgaatcctccggcggagttttcagctacaaagtttgcttcattcatcacccaatactccacaggacaagtgagcgtggagattgaatgggagctgcagaaagaaaacagcaagcgctggaatcccgaagtgcagtacacatccaattatgcaaaatctgccaacgttgatttcactgtggacaacaatggactttatactgagcctcgccccattggcacccgttacctcacccgtcccctgtaa

SEQ ID NO: 564 - protein, 736 aa, Artificial Sequence
  Description of Artificial Sequence: Synthetic polypeptide
MAADGYLPDWLEDNLSEGIREWWDLKPGAPKPKANQQKQDDGRGLVLPGYKYLGPFNGLDKGEPVNAADAAALEHDKAYDQQLKAGDNPYLRYNHADAEFQERLQEDTSFGGNLGRAVFQAKKRVLEPLGLVEEAAKTAPGKKRPVEQSPQEPDSSSGIGKTGQQPAKKRLNFGQTGDSESVPDPQPLGEPPAAPSGVGSLTMASGGGAPMADNNEGADGVGNASGNWHCDSTWLGDRVITTSTRTWALPTYNNHLYKQISSASTGASNDNHYFGYSTPWGYFDFNRFHCHFSPRDWQRLINNNWGFRPKRLNFKLFNIQVKEVTTNDGVTTIANNLTSTVQVFSDSEYQLPYVLGSAHQGCLPPFPADVFMIPQYGYLTLNNGSQAVGRSSFYCLEYFPSQMLRTGNNFTFSYTFEEVPFHSSYAHSQSLDRLMNPLIDQYLYYLNRTQNQSGSAQNKDLLFSRGSPAGMSVQPKNWLPGPCYRQQCVSKTKTDNNNSNFTWTGASKYNLNGRESIINPGTAMASHKDDKDKFFPMSGVMIFGKESAGASNTALDNVMITDEEEIKATNPVATERFGTVAVNLQSSSTDPATGDVHVMGALPGMVWQDRDVYLQGPIWAKIPHTDGHFHPSPLMGGFGLKNPPPQILIKNTPVPANPPAEFSATKFASFITQYSTGQVSVEIEWELQKENSKRWNPEVQYTSNYAKSANVDFTVDNNGLYTEPRPIGTRYLTRPL

SEQ ID NO: 565 - DNA, 2211 bp, Artificial Sequence
  Description of Artificial Sequence: Synthetic polynucleotide
atggctgccgatggttatcttccagattggctcgaggacaacctctctgagggcattcgcgaatggtgggacttgaaacctggagccccgaaacccaaagtcaaccagcaaaagcaggacaacgctcggggtcttgtgcttccgggttacaaatacctcggacccttcaacggactcgacaagggggagcccgtcaacgcggcggacgcagcggccctcgagcacgacaaggcctacgaccagcagctcaaagcgggtgacaatccgtaccttcggtataaccacgccgacgccgagtttcaggagcgtctgcaagaagatacgtcttttgggggcaaccttggacgagcagtcttccaggccaagaagagggttctcgaaccttttggtctggttgaggaaggtgctaagacggctcctggaaagaaacgtccggtagagcagtcgccacaagagccagactcctcctcgggcattggcaagacaggccagcagcccgctaaaaagagactcaattttggtcagactggcgactcagagtcagtccccgacccacaacctctcggagaacctccagcaacccccgctgctgtgggacctactacaatggcttcaggcggtggcgcaccaatggcagacaataacgaaggcgccgacggagtgggtaatgcctcaggaaattggcattgcgattccacatggctgggcgacagagtcatcaccaccagcacccgcacctgggccttgcccacctacaataaccacctctacaagcaaatctccagtgcttcaacgggggccagcaacgacaaccactacttcggctacagcaccccctgggggtattttgacttcaacagattccactgccacttttcaccacgtgactggcaaagactcatcaacaacaattggggattccggcccaagagactcaacttcaagctcttcaacatccaagtcaaggaggtcacgacgaatgatggcgtcacgaccatcgctaataaccttaccagcacggttcaagtcttctcggactcggagtaccagttgccgtacgtcctcggctctgcgcaccagggctgcctccctccgttcccggcggacgtgttcatgattccgcaatacggctacctgacgctcaacaatggcagccaggcagtgggacggtcatccttttactgcctggaatatttcccatcgcagatgctgagaacgggcaataactttaccttcagctacacttttgaggacgttcctttccacagcagctacgctcacagccagagcctggaccggctgatgaatcctctcatcgaccagtacctgtattacctgaacagaactcagaatcagtccggaagtgcccaaaacaaggacttgctgtttagccgtgggtctccaactggcatgtctgttcagcccaaaaactggctacctggaccctgttatcggcagcagcgcgtttctaaaacaaaaacagacaacaacaacagcaactttacctggactggtgcttcaaaatataaccttaatgggcgtgaatctataatcaaccctggcactgctatggcctcacacaaagacgacgaagacaagttctttcccatgagcggtgtcatgatttttggaaaggagagcgccggagcttcaaacactgcattggacaatgtcatgatcacagacgaagaggaaatcaaagccactaaccccgtggccactgaaagatttgggactgtggcagtcaatctccagagcagcagcacagaccctgcgaccggagatgtgcatgccatgggagccttacctggaatggtgtggcaagacagagacgtatacctgcagggtcctatttgggccaaaattcctcacacggatggacactttcacccgtctcctctcatgggcggctttggacttaagcacccgcctcctcagatcctcatcaaaaacacgcctgttcctgcgaatcctccggcagagttttcggctacaaagtttgcttcattcatcacccagtattccacaggacaagtgagcgtggagattgaatgggagctgcagaaagaaaacagcaaacgctggaatcccgaagtgcagtatacatctaactatgcaaaatctgccaacgttgatttcactgtggacaacaatggactttatactgagcctcgccccattggcacccgttacctcacccgtcccctgtaa

SEQ ID NO: 566 - protein, 736 aa, Artificial Sequence
  Description of Artificial Sequence: Synthetic polypeptide
MAADGYLPDWLEDNLSEGIREWWDLKPGAPKPKVNQQKQDNARGLVLPGYKYLGPFNGLDKGEPVNAADAAALEHDKAYDQQLKAGDNPYLRYNHADAEFQERLQEDTSFGGNLGRAVFQAKKRVLEPFGLVEEGAKTAPGKKRPVEQSPQEPDSSSGIGKTGQQPAKKRLNFGQTGDSESVPDPQPLGEPPATPAAVGPTTMASGGGAPMADNNEGADGVGNASGNWHCDSTWLGDRVITTSTRTWALPTYNNHLYKQISSASTGASNDNHYFGYSTPWGYFDFNRFHCHFSPRDWQRLINNNWGFRPKRLNFKLFNIQVKEVTTNDGVTTIANNLTSTVQVFSDSEYQLPYVLGSAHQGCLPPFPADVFMIPQYGYLTLNNGSQAVGRSSFYCLEYFPSQMLRTGNNFTFSYTFEDVPFHSSYAHSQSLDRLMNPLIDQYLYYLNRTQNQSGSAQNKDLLFSRGSPTGMSVQPKNWLPGPCYRQQRVSKTKTDNNNSNFTWTGASKYNLNGRESIINPGTAMASHKDDEDKFFPMSGVMIFGKESAGASNTALDNVMITDEEEIKATNPVATERFGTVAVNLQSSSTDPATGDVHAMGALPGMVWQDRDVYLQGPIWAKIPHTDGHFHPSPLMGGFGLKHPPPQILIKNTPVPANPPAEFSATKFASFITQYSTGQVSVEIEWELQKENSKRWNPEVQYTSNYAKSANVDFTVDNNGLYTEPRPIGTRYLTRPL

SEQ ID NO: 567 - DNA, 2208 bp, Artificial Sequence
  Description of Artificial Sequence: Synthetic polynucleotide
  modified_base (955)..(955): a, c, g, or t
  modified_base (971)..(972): a, c, g, or t
  modified_base (981)..(981): a, c, g, or t
  modified_base (986)..(986): a, c, g, or t
  modified_base (1235)..(1235): a, c, g, or t
  modified_base (1694)..(1696): a, c, g, or t
  modified_base (1698)..(1698): a, c, g, or t
  modified_base (1763)..(1765): a, c, g, or t
  modified_base (1778)..(1778): a, c, g, or t
  modified_base (2204)..(2204): a, c, g, or t
atggctgccgatggttatcttccagattggctcgaggacaacctctctgagggcattcgcgaatggtgggacttgaaacctggagccccgaaacccaaagtcaaccagcaaaagcaggacaacgctcggggtcttgtgcttccgggttacaaatacctcggacccttcaacggactcgacaagggggagcccgtcaacgcggcggacgcagcggccctcgagcacgacaaggcctacgaccagcagctcaaagcgggtgacaatccgtaccttcggtataaccacgccgacgccgagtttcaggagcgtctgcaagaagatacgtcttttgggggcaaccttggacgagcagtcttccaggccaagaagagggttctcgaaccttttggtctggttgaggaaggtgctaagacggctcctggaaagaaacgtccggtagagcagtcgccacaagagccagactcctcctcgggcattggcaagacaggccagcagcccgctaaaaagagactcaattttggtcagactggcgactcagagtcagtccccgacccacaacctctcggagaacctccagcaacccccgctgctgtgggacctactacaatggcttcaggcggtggcgcaccaatggcagacaataacgaaggcgccgacggagtgggtaatgcctcaggaaattggcattgcgattccacatggctgggcgacagagtcatcaccaccagcacccgaacatgggccttgcccacctataacaaccacctctacaagcaaatctccagtgcttcaacgggggccagcaacgacaaccactacttcggctacagcaccccctgggggtattttgatttcaacagattccactgccacttttcaccacgtgactggcagcgactcatcaataacaattggggattccggcccaagagactcaacttcaaactcttcaacntccaagtcaaggaggnnacgacgaangatgncgtcacaaccatcgctaataaccttaccagcacggttcaagtcttctcggactcggagtaccagcttccgtacgtcctcggctctgcgcaccagggctgcctccctccgttcccggcggacgtgttcatgattccgcaatacggctacctgacgctcaacaatggcagccaggcagtgggacggtcatccttttactgcctggaatatttcccatcgcagatgctgagaacgggcaataactttacctncagctacacttttgaggacgttcctttccacagcagctacgctcacagccagagcctggaccggctgatgaatcctctcatcgaccagtacctgtattacctgaacagaactcagaatcagtccggaagtgcccaaaacaaggacttgctgtttagccgtgggtctccaactggcatgtctgttcagcccaaaaactggctacctggaccctgttatcggcagcagcgcgtttctaaaacaaaaacagacaacaacaacagcaactttacctggactggtgcttcaaaatataaccttaatgggcgtgaatctataatcaaccctggcactgctatggcctcacacaaagacgacgaagacaagttctttcccatgagcggtgtcatgatttttggaaaggagagcgccggagcttcaaacactgcattggacaatgtcatgatcacagacgaagagannncnaagccactaaccccgtggccactgaaagatttgggactgtggcagtcaatctccaagcagcacannnaccctgcgaccgnagatgtgcatgccatgggagccttacctggaatggtgtggcaagacagagacgtatacctgcagggtcctatttgggccaaaattcctcacacggatggacactttcacccgtctcctctcatgggcggctttggacttaagcacccgcctcctcagatcctcatcaaaaacacgcctgttcctgcgaatcctccggcagagttttcggctacaaagtttgcttcattcatcacccagtattccacaggacaagtgagcgtggagattgaatgggagctgcagaaagaaaacagcaaacgctggaatcccgaagtgcagtatacatctaactatgcaaaatctgccaacgttgatttcactgtggacaacaatggactttatactgagcctcgccccattggcacccgttacctcacccgtccccngtaa

SEQ ID NO: 568 - protein, 723 aa, Artificial Sequence
  Description of Artificial Sequence: Synthetic polypeptide
MAADGYLPDWLEDNLSEGIREWWDLKPGAPKPKVNQQKQDNARGLVLPGYKYLGPFNGLDKGEPVNAADAAALEHDKAYDQQLKAGDNPYLRYNHADAEFQERLQEDTSFGGNLGRAVFQAKKRVLEPFGLVEEGAKTAPGKKRPVEQSPQEPDSSSGIGKTGQQPAKKRLNFGQTGDSESVPDPQPLGEPPATPAAVGPTTMASGGGAPMADNNEGADGVGNASGNWHCDSTWLGDRVITTSTRTWALPTYNNHLYKQISSASTGASNDNHYFGYSTPWGYFDFNRFHCHFSPRDWQRLINNNWGFRPKRLNFKLFNQVKETTDVTTIANNLTSTVQVFSDSEYQLPYVLGSAHQGCLPPFPADVFMIPQYGYLTLNNGSQAVGRSSFYCLEYFPSQMLRTGNNFTSYTFEDVPFHSSYAHSQSLDRLMNPLIDQYLYYLNRTQNQSGSAQNKDLLFSRGSPTGMSVQPKNWLPGPCYRQQRVSKTKTDNNNSNFTWTGASKYNLNGRESIINPGTAMASHKDDEDKFFPMSGVMIFGKESAGASNTALDNVMITDEEATNPVATERFGTVAVNLQSSPATDVHAMGALPGMVWQDRDVYLQGPIWAKIPHTDGHFHPSPLMGGFGLKHPPPQILIKNTPVPANPPAEFSATKFASFITQYSTGQVSVEIEWELQKENSKRWNPEVQYTSNYAKSANVDFTVDNNGLYTEPRPIGTRYLTRP

SEQ ID NO: 569 - DNA, 2208 bp, Artificial Sequence
  Description of Artificial Sequence: Synthetic polynucleotide
atggctgccgatggttatcttccagattggctcgaggacactctctctgaaggaataagacagtggtggaagctcaaacctggcccaccaccaccaaagcccgcagagcggcataaggacgacagcaggggtcttgtgcttcctgggtacaagtacctcggacccttcaacggactcgacaagggagagccggtcaacgaggcagacgccgcggccctcgagcacgacaaagcctatgaccggcagctcgacagcggagacaacccgtacctcaagtacaaccacgccgacgcggagtttcaggagcgccttaaagaagatacgtcttttgggggcaacctcggacgagcagtcttccaggcgaaaaagagggttcttgaacctctgggcctggttgaggaacctgttaagacggctccgggaaaaaagaggccggtagagcactctcctgtggagccagactcctcctcgggaaccggaaaggcgggtcagcagcctgcaagaaaaagattgaattttggtcagactggagacgcagactcagtacctgacccccagcctctcggacagccaccagcagccccctctggtctgggaactaatacgatggctacaggcagtggcgcaccaatggcagacaataacgagggcgccgacggagtgggtaattcctcgggaaattggcattgcgattccacatggatgggcgacagagtcatcaccaccagcacccgaacctgggccctgcccacctacaacaaccacctctacaaacaaatttccagccaatcaggagcctcgaacgacaatcactactttggctacagcaccccttgggggtattttgacttcaacagattccactgccacttttcaccacgtgactggcaaagactcatcaacaacaactggggattccgacccaagagactcaagttcaagctctttaacattcaagtcaaagaggtcacgcagaatgacggtacgacgacgattgccaataaccttaccagcacggttcaggtgtttactgactcggagtaccagctcccgtacgtcctcggctcggcgcatcaaggatgcctcccgccgttcccagcagacgtcttcatggtgccacagtatggatacctcaccctgaacaacgggagtcaggcagtaggacgctcttcattttactgcctggagtactttccttctcagatgctgcgtaccggtaacaactttaccttcagctacacttttgaggacgttcctttccacagcagctacgctcacagccagagtctggaccgtctcatgaatcctctcatcgaccagtacctgtattacttgagcagaacagacgctccaagtggaaccaccacgcagtcaaggcttcagttttctcaggccggagcgagtgacattcgggaccagtctaggaactggcttcctggaccctgttaccgccagcagcgagtatcaaagacatctgcggataacaacaacagtgaatactcgtggactggagctaccaagtaccacctcaatggcagagactctctggtgaatccgggcccggccatggcaagccacaaggacgatgaagaaaagttttttcctcagagcggggttctcatctttgggaagcaaggctcagagaaaacaagtgtggacattgaaaaggtcatgattacagacgaagaggaaatcaggacaaccaatcccgtggctacggagcagtatggttctgtatctaccaacctccagagaggcaacagacaagcagctaccgcagatgtcaacacacaaggcgttcttccaggcatggtctggcaggacagagatgtgtaccttcaggggcccatctgggcaaagattccacacacggacggacattttcacccctctcccctcatgggtggattcggacttaaacaccctcctccacagattctcatcaagaacaccccggtacctgcgaatccttcgaccaccttcagtgcggcaaagtttgcttccttcatcacacagtactccacgggacaggtcagcgtggagatcgagtgggagctgcagaaggaaaacagcaaacgctggaatcccgaagttcagtacacttccaactacaacaagtctgttaatgtggactttactgtggacactaatggcgtgtattcagagcctcgccccattggcaccagatacctgactcgtaatctgtaa

SEQ ID NO: 570 - protein, 735 aa, Artificial Sequence
  Description of Artificial Sequence: Synthetic polypeptide
MAADGYLPDWLEDTLSEGIRQWWKLKPGPPPPKPAERHKDDSRGLVLPGYKYLGPFNGLDKGEPVNEADAAALEHDKAYDRQLDSGDNPYLKYNHADAEFQERLKEDTSFGGNLGRAVFQAKKRVLEPLGLVEEPVKTAPGKKRPVEHSPVEPDSSSGTGKAGQQPARKRLNFGQTGDADSVPDPQPLGQPPAAPSGLGTNTMATGSGAPMADNNEGADGVGNSSGNWHCDSTWMGDRVITTSTRTWALPTYNNHLYKQISSQSGASNDNHYFGYSTPWGYFDFNRFHCHFSPRDWQRLINNNWGFRPKRLKFKLFNIQVKEVTQNDGTTTIANNLTSTVQVFTDSEYQLPYVLGSAHQGCLPPFPADVFMVPQYGYLTLNNGSQAVGRSSFYCLEYFPSQMLRTGNNFTFSYTFEDVPFHSSYAHSQSLDRLMNPLIDQYLYYLSRTDAPSGTTTQSRLQFSQAGASDIRDQSRNWLPGPCYRQQRVSKTSADNNNSEYSWTGATKYHLNGRDSLVNPGPAMASHKDDEEKFFPQSGVLIFGKQGSEKTSVDIEKVMITDEEEIRTTNPVATEQYGSVSTNLQRGNRQAATADVNTQGVLPGMVWQDRDVYLQGPIWAKIPHTDGHFHPSPLMGGFGLKHPPPQILIKNTPVPANPSTTFSAAKFASFITQYSTGQVSVEIEWELQKENSKRWNPEVQYTSNYNKSVNVDFTVDTNGVYSEPRPIGTRYLTRNL

SEQ ID NO: 571 - DNA, 2208 bp, Artificial Sequence
  Description of Artificial Sequence: Synthetic polynucleotide
atggctgccgatggttatcttccagattggctcgaggacactctctctgaaggaataagacagtggtggaagctcaaacctggcccaccaccaccaaagcccgcagagcggcataaggacgacagcaggggtcttgtgcttcctgggtacaagtacctcggacccttcaacggactcgacaagggagagccggtcaacgaggcagacgccgcggccctcgagcacgacaaagcctatgaccggcagctcgacagcggagacaacccgtacctcaagtacaaccacgccgacgcggagtttcaggagcgccttaaagaagatacgtcttttgggggcaacctcggacgagcagtcttccaggcgaaaaagagggttcttgaacctctgggcctggttgaggaacctgttaagacggctccgggaaaaaagaggccggtagagcactctcctgtggagccagactcctcctcgggaaccggaaaggcgggccagcagcctgcaagaaaaagattgaattttggtcagactggagacgcaaactcagtacctgacccccagcctctcggacagccaccagcagccccctctggtctgggaactaatacgatggctacaggcagtggcgcaccaatggcagacaataacgagggcgccgacggagtgggtaattcctcgggaaattggcattgcgattccacatggatgggcgacagagtcatcaccaccagcacccgaacctgggccctgcccacctacaacaaccacctctacaaacaaatttccagccaatcaggagcctcgaacgacaatcactactttggctacagcaccccttgggggtattttgacttcaacagattccactgccacttttcaccacgtgactggcaaagactcatcaacaacaactggggattccgacccaagagactcaagttcaagctctttaacattcaagtcaaagaggtcacgcagaatgacggtacgacgacgattgccaataaccttaccagcacggttcaggtgtttactgactcggagtaccagctcccgtacgtcctcggctcggcgcatcaaggatgcctcccgccgttcccagcagacgtcttcatggtgccacagtatggatacctcaccctgaacaacgggagtcgggcagtaggacgctcttcattttactgcctggagtactttccttctcagatgctgcgtaccggtaacaactttaccttcagctacacttttgaggacgttcctttccacagcagctacgctcacagccagagtctggaccgtctcatgaatcctctcatcgaccagtacctgtattacttgagcagaacagacactccaagtggaaccaccacgcagtcaaggcttcagttttctcaggccggagcgagtgacattcgggaccagtctaggaactggcttcctggaccctgttaccgccagcagcgagtatcaaagacatctgcggataacaacaacagtgaatactcgtggactggagctaccaagtaccacctcaatggcagagactctctggtgaatccgggcccggccatggcaagccacaaggacgatgaagaaaagttttttcctcagagcggggttctcatctttgggaagcaaggctcagagaaaacaagtgtggacattgaaaaggtcatgattacagacgaagaggaaatcaggacgaccaatcccgtggctacggagcagtatggttctgtatctaccaacctccagagaggcaacagacaagcagctaccgcagatgtcaacacacaaggcgttcttccaggcatggtctggcaggacagagatgtgtaccttcaggggcccatctgggcaaagattccacacacggacggacattttcacccctctcccctcatgggtggattcggacttaaacaccctcctccacagattctcatcaagaacaccccggtacctgcgaatccttcgaccaccttcagtgcggcaaagtttgcttccttcatcacacagtactccacgggacaggtcagcgtggagatcgagtgggagctgcagaaggaaaacagcaaacgctggaatcccgaagttcagtacacttccaactacaacaagtctgttaatgtggactttactgtggacactaatggcgtgtatacagagcctcgccccattggcaccagatacctgactcgtaatctgtaa

SEQ ID NO: 572 - protein, 735 aa, Artificial Sequence
  Description of Artificial Sequence: Synthetic polypeptide
MAADGYLPDWLEDTLSEGIRQWWKLKPGPPPPKPAERHKDDSRGLVLPGYKYLGPFNGLDKGEPVNEADAAALEHDKAYDRQLDSGDNPYLKYNHADAEFQERLKEDTSFGGNLGRAVFQAKKRVLEPLGLVEEPVKTAPGKKRPVEHSPVEPDSSSGTGKAGQQPARKRLNFGQTGDANSVPDPQPLGQPPAAPSGLGTNTMATGSGAPMADNNEGADGVGNSSGNWHCDSTWMGDRVITTSTRTWALPTYNNHLYKQISSQSGASNDNHYFGYSTPWGYFDFNRFHCHFSPRDWQRLINNNWGFRPKRLKFKLFNIQVKEVTQNDGTTTIANNLTSTVQVFTDSEYQLPYVLGSAHQGCLPPFPADVFMVPQYGYLTLNNGSRAVGRSSFYCLEYFPSQMLRTGNNFTFSYTFEDVPFHSSYAHSQSLDRLMNPLIDQYLYYLSRTDTPSGTTTQSRLQFSQAGASDIRDQSRNWLPGPCYRQQRVSKTSADNNNSEYSWTGATKYHLNGRDSLVNPGPAMASHKDDEEKFFPQSGVLIFGKQGSEKTSVDIEKVMITDEEEIRTTNPVATEQYGSVSTNLQRGNRQAATADVNTQGVLPGMVWQDRDVYLQGPIWAKIPHTDGHFHPSPLMGGFGLKHPPPQILIKNTPVPANPSTTFSAAKFASFITQYSTGQVSVEIEWELQKENSKRWNPEVQYTSNYNKSVNVDFTVDTNGVYTEPRPIGTRYLTRNL

SEQ ID NO: 573 - DNA, 2211 bp, Artificial Sequence
  Description of Artificial Sequence: Synthetic polynucleotide
atggctgccgatggttatcttccagattggctcgaggacactctctctgaaggaataagacagtggtggaagctcaaacctggcccaccaccaccaaagcccgcagagcggcataaggacgacagcaggggtcttgtgcttcctgggtacaagtacctcggacccttcaacggactcgacaagggagagccggtcaacgaggcagacgccgcggccctcgagcacgacaaggcctacgaccagcagctcaaagcgggtgacaatccgtacctgcggtataaccacgccgacgccgagtttcaggagcgtctgcaagaagatacgtcttttgggggcaacctcgggcgagcagtcttccaggccaagaagcgggttctcgaacctctcggtctggttgaggaaggcgctaagacggctcctggaaagaaacgtccggtagagcagtcgccacaagagccagactcctcctcgggcatcggcaagacaggccagcagcccgctaaaaagagactcaattttggtcagactggcgactcagagtcagtccccgacccacaacctctcggagaacctccagcaacccccgctgctgtgggacctactacaatggcttcaggcggtggcgcaccaatggcagacaataacgaaggcgccgacggagtgggtaatgcctcaggaaattggcattgcgattccacatggctgggcgacagagtcatcaccaccagcacccgaacatgggccttgcccacctataacaaccacctctacaagcaaatctccagtgcttcgacgggggccagcaacgacaaccactacttcggctacagcaccccctgggggtattttgactttaacagattccactgccacttttcaccacgtgactggcagcgactcatcaacaataactggggattccggcccaagagactcagcttcaagctcttcaacatccaggtcaaggaggtcacgacgaatgatggcgtcacaaccatcgctaataaccttaccagcacggttcaagtcttctcggactcggagtaccagcttccgtacgtcctcggctctgcgcaccagggctgcctccctccgttcccggcggacgtgttcatgattccgcaatacggctacctgacgctcaacaatggcagccaagccgtgggacgttcatccttttactgcctggaatatttcccttctcagatgctgagaacgggcaacaactttaccttcagctacacctttgaggaagtgcctttccacagcagctacgcgcacagccagagcctggaccggctgatgaatcctctcatcgatcaatacctgtattacctgaacagaactcaaaatcagtccggaagtgcccaaaacaaggacttgctgtttagccgtgggtctccagctggcatgtctgttcagcccaaaaactggctacctggaccctgttatcggcagcagcgcgtttctaaaacaaaaacagacaacaacaacagcaattttacctggactggtgcttcaaaatataacctcaatgggcgtgaatccatcatcaaccctggcactgctatggcctcacacaaagacgacgaagacaagttctttcccatgagcggtgtcatgatttttggaaaagagagcgccggagcttcaaacactgcattggacaatgtcatgattacggacgaagaggaaattaaagccactaaccctgtggccaccgaaagatttgggaccgtggcagtcaatttccagagcagcagcacagaccctgcgaccggagatgtgcatgctatgggagcattacctggcatggtgtggcaagatagagacgtgtacctgcagggtcccatttgggccaaaattcctcacacagatggacactttcacccgtctcctcttatgggcggctttggactcaagaacccgcctcctcagatcctcatcaaaaacacgcctgttcctgcgaatcctccggcggagttttcagctacaaagtttgcttcattcatcactcaatactccacaggacaagtgagcgtggaaattgaatgggagctgcagaaagaaaacagcaaacgctggaatcccgaagtgcagtatacatctaactatgcaaaatctgccaacgttgatttcactgtggacaacaatggactttatactgagcctcgccccattggcacccgttacctcacccgtcccctgtaa

SEQ ID NO: 574 - protein, 736 aa, Artificial Sequence
  Description of Artificial Sequence: Synthetic polypeptide
MAADGYLPDWLEDTLSEGIRQWWKLKPGPPPPKPAERHKDDSRGLVLPGYKYLGPFNGLDKGEPVNEADAAALEHDKAYDQQLKAGDNPYLRYNHADAEFQERLQEDTSFGGNLGRAVFQAKKRVLEPLGLVEEGAKTAPGKKRPVEQSPQEPDSSSGIGKTGQQPAKKRLNFGQTGDSESVPDPQPLGEPPATPAAVGPTTMASGGGAPMADNNEGADGVGNASGNWHCDSTWLGDRVITTSTRTWALPTYNNHLYKQISSASTGASNDNHYFGYSTPWGYFDFNRFHCHFSPRDWQRLINNNWGFRPKRLSFKLFNIQVKEVTTNDGVTTIANNLTSTVQVFSDSEYQLPYVLGSAHQGCLPPFPADVFMIPQYGYLTLNNGSQAVGRSSFYCLEYFPSQMLRTGNNFTFSYTFEEVPFHSSYAHSQSLDRLMNPLIDQYLYYLNRTQNQSGSAQNKDLLFSRGSPAGMSVQPKNWLPGPCYRQQRVSKTKTDNNNSNFTWTGASKYNLNGRESIINPGTAMASHKDDEDKFFPMSGVMIFGKESAGASNTALDNVMITDEEEIKATNPVATERFGTVAVNFQSSSTDPATGDVHAMGALPGMVWQDRDVYLQGPIWAKIPHTDGHFHPSPLMGGFGLKNPPPQILIKNTPVPANPPAEFSATKFASFITQYSTGQVSVEIEWELQKENSKRWNPEVQYTSNYAKSANVDFTVDNNGLYTEPRPIGTRYLTRPL

SEQ ID NO: 575 - protein, 735 aa, Artificial Sequence
  Description of Artificial Sequence: Synthetic polypeptide
MAADGYLPDWLEDTLSEGIRQWWKLKPGPPPPKPAERHKDDSRGLVLPGYKYLGPFNGLDKGEPVNEADAAALEHDKAYDRQLDSGDNPYLKYNHADAEFQERLKEDTSFGGNLGRAVFQAKKRVLEPLGLVEEPVKTAPGKKRPVEHSPVEPDSSSGTGKAGQQPARKRLNFGQTGDADSVPDPQPLGQPPAAPSGLGTNTMATGSGAPMADNNEGADGVGNSSGNWHCDSTWMGDRVITTSTRTWALPTYNNHLYKQISSQSGASNDNHYFGYSTPWGYFDFNRFHCHFSPRDWQRLINNNWGFRPKRLKFKLFNIQVKEVTQNDGTTTIANNLTSTVQVFTDSEYQLPYVLGSAHQGCLPPFPADVFMVPQYGYLTLNNGSQAVGRSSFYCLEYFPSQMLRTGNNFTFSYTFEDVPFHSSYAHSQSLDRLMNPLIDQYLYYLSRTDTPSGTTTQSRLQFSQAGASDIRNQSRNWLPGPCYRQQRVSKTSADNNNSEYSWTGATKYHLNGRDSLVNPGPAMASHKDDEEKFFPQSGVLIFGKQGSEKTSVDIEKVMITDEEEIRTTNPVATEQYGSVSTNLQRGNRQAATADVNTQGVLPGMVWQDRDVYLQGPIWAKIPHTDGHFHPSPLMGGFGLKHPPPQILIKNTPVPANPSTTFSAAKFASFITQYSTGQVSVEIEWELQKENSKRWNPEVQYTSNYNKSVNVDFTVDTNGVYSEPRPIGTRYLTRNQ

SEQ ID NO: 576 - DNA, 2208 bp, Artificial Sequence
  Description of Artificial Sequence: Synthetic polynucleotide
atggctgccgatggttatcttccagattggctcgaggacactctctctgaaggaataagacagtggtggaagctcaaacctggcccaccaccaccaaagcccgcagagcggcataaggacgacagcaggggtcttgtgcttcctgggtacaagtacctcggacccttcaacggactcgacaagggagagccggtcaacgaggcagacgccgcggccctcgagcacgacaaagcctatgaccggcagctcgacagcggagacaacccgtacctcaagtacaaccacgccgacgcggagtttcaggaacgccttaaagaagatacgtcttttgggggcaacctcggacgagcagtcttccaggcgaaaaagagggttcttgaacctctgggcctggttgaggaacctgttaagacggctccgggaaaaaagaggccggtagagcactctcctgtggagccagactcctcctcgggaaccggaaaggcgggccagcagcctgcaagaaaaagattgaattttggtcagactggagacgcagactcagtacctgacccccagcctctcggacagccaccagcagccccctctggtctgggaactaatacgatggctacaggcagtggcgcaccaatggcagacaataacgagggcgccgacggagtgggtaattcctcgggaaattggcattgcgattccacatggatgggcgacagagtcatcaccaccagcacccgaacctgggccctgcccacctacaacaaccacctctacaaacaaatttccagccaatcaggagcctcgaacgacaatcactactttggctacagcaccccttgggggtattttgacttcaacagattccactgccacttttcaccacgtgactggcaaagactcatcaacaacaactggggattccgacccaagagactcaagttcaagctctttaacattcaagtcaaagaggtcacgcagaatgacggtacgacgacgattgccaataaccttaccagcacggttcaggtgtttactgactcggagtaccagctcccgtacgtcctcggctcggcgcatcaaggatgcctcccgccgttcccagcagacgtcttcatggtgccacagtatggatacctcaccctgaacaacgggagtcaggcagtaggacgctcttcattttactgcctggagtactttccttctcagatgctgcgtaccggtaacaactttaccttcagctacacttttgaggacgttcctttccacagcagctacgctcacagccagagtctggaccgtctcatgaatcctctcatcgaccagtacctgtattacttgagcagaacagacactccaagtggaaccaccacgcagtcaaggcttcagttttctcaggccggagcgagtgacattcggaaccagtctaggaactggcttcctggaccctgttaccgccagcagcgagtatcaaagacatctgcggataacaacaacagtgaatactcgtggactggagctaccaagtaccacctcaatggcagagactctctggtgaatccgggcccggccatggcaagccacaaggacgatgaagaaaagttttttcctcagagcggggttctcatctttgggaagcaaggctcagagaaaacaagtgtggacattgaaaaggtcatgattacagacgaagaggaaatcaggacaaccaatcccgtggctacggagcagtatggttctgtatctaccaacctccagagaggcaacagacaagcagctaccgcagatgtcaacacacaaggcgttcttccaggcatggtctggcaggacagagatgtgtaccttcaggggcccatctgggcaaagattccacacacggacggacattttcacccctctcccctcatgggtggattcggacttaaacaccctcctccacagattctcatcaagaacaccccggtacctgcgaatccttcgaccaccttcagtgcggcaaagtttgcttccttcatcacacagtactccacgggacaggtcagcgtggagatcgagtgggagctgcagaaggaaaacagcaaacgctggaatcccgaagttcagtacacttccaactacaacaagtctgttaatgtggactttactgtggacactaatggcgtgtattcagagcctcgccccattggcaccagatacctgactcgtaatcagtaa

SEQ ID NO: 577 - DNA, 2208 bp, Artificial Sequence
  Description of Artificial Sequence: Synthetic polynucleotide
atggctgccgatggttatcttccagattggctcgaggacactctctctgaaggaataagacagtggtggaagctcaaacctggcccaccaccaccaaagcccgcagagcggcataaggacgacagcaggggtcttgtgcttcctgggtacaagtacctcggacccttcaacggactcgacaagggagagccggtcaacgaggcagacgccgcggccctcgagcacgacaaagcctatgaccggcagctcgacagcggagacaacccgtacctcaagtacaaccacgccgacgcggagtttcaggagcgccttaaagaagatacgtcttttgggggcaacctcggacgagcagtcttccaggcgaaaaagagggttcttgaacctctgggcctggttgaggaacctgttaagacggctccgggaaaaaagaggccggtagagcactctcctgtggagccagactcctcctcgggaaccggaaaggcgggccagcagcctgcaagaaaaagattgaattttggtcagactggagacgcagactcagtacctgatccccagcctctcggacagccaccagcagccccctctggtctgggaactaatacgatggctacaggcagtggcgcaccaatggcagacaataacgagggcgccgacggagtgggtaattcctcgggaaattggcattgcgattccacatggatgggcgacagagtcatcaccaccagcacccgaacctgggccctgcccacctacaacaaccacctctacaaacaaatttccagccaatcaggagcctcgaacgacaatcactactttggctacagcaccccttgggggtattttgacttcaacagattccactgccacttttcaccacgtgactggcaaagactcatcaacaacaactggggattccgacccaagagactcaagttcaagctctttaacattcaagtcaaagaggtcacgcagaatgacggtacgacgacgattgccaataaccttaccagcacggttcaggtgtttactgactcggagtaccagctcccgtatgtcctcggctcggcgcatcaaggatgcctcccgccgttcccagcagacgtcttcatggtgccacagtatggatacctcaccctgaacaacgggagtcaggcagtaggacgctcttcattttactgcctggagtactttccttctcagatgctgcgtaccggtaacaactttaccttcagctacacttttgaggacgttcctttccacagcagctacgctcacagccagagtctggaccgtctcatgaatcctctcatcgaccagtacctgtattacttgagcagaacagacactccaagtggaaccaccacgcagtcaaggcttcagttttctcaggccggagcgagtgacattcgggaccagtctaggaactggcttcctggaccctgttaccgccagcagcgagtatcaaagacatctgcggataacaacaacagtgaatactcgtggactggagctaccaagtaccacctcaatggcagagactctctggtgaatccgggcccggccatggcaagccacaaggacgatgaagaaaagttttttcctcagagcggggttctcatctttgggaagcaaggctcagagaaaacaagtgtggacattgaaaaggtcatgattacagacgaagaggaaatcaggacaaccaatcccgtggctacggagcagtatggttctgtatctaccaacctccagagaggcaacagacaagcagctaccgcagatgtcaacacacaaggcgttcttccaggcatggtctggcaggacagagatgtgtaccttcaggggcccatctgggcaaagattccacacacggacggacattttcacccctctcccctcatgggtggattcggacttaaacaccctcctccacagattctcatcaagaacaccccggtacctgcgaatccttcgaccaccttcagtgcggcaaagtttgcttccttcatcacacagtactccacgggacaggtcagcgtggagatcgagtgggagctgcagaaggaaaacagcaaacgctggaatcccgaagttcagtacacttccaactacaacaagtctgttaatgtggactttactgtggacactaatggcgtgtattcagagcctcgccccattggcaccagatacctgactcgtaatctgtaa

SEQ ID NO: 578 - protein, 735 aa, Artificial Sequence
  Description of Artificial Sequence: Synthetic polypeptide
MAADGYLPDWLEDTLSEGIRQWWKLKPGPPPPKPAERHKDDSRGLVLPGYKYLGPFNGLDKGEPVNEADAAALEHDKAYDRQLDSGDNPYLKYNHADAEFQERLKEDTSFGGNLGRAVFQAKKRVLEPLGLVEEPVKTAPGKKRPVEHSPVEPDSSSGTGKAGQQPARKRLNFGQTGDADSVPDPQPLGQPPAAPSGLGTNTMATGSGAPMADNNEGADGVGNSSGNWHCDSTWMGDRVITTSTRTWALPTYNNHLYKQISSQSGASNDNHYFGYSTPWGYFDFNRFHCHFSPRDWQRLINNNWGFRPKRLKFKLFNIQVKEVTQNDGTTTIANNLTSTVQVFTDSEYQLPYVLGSAHQGCLPPFPADVFMVPQYGYLTLNNGSQAVGRSSFYCLEYFPSQMLRTGNNFTFSYTFEDVPFHSSYAHSQSLDRLMNPLIDQYLYYLSRTDTPSGTTTQSRLQFSQAGASDIRDQSRNWLPGPCYRQQRVSKTSADNNNSEYSWTGATKYHLNGRDSLVNPGPAMASHKDDEEKFFPQSGVLIFGKQGSEKTSVDIEKVMITDEEEIRTTNPVATEQYGSVSTNLQRGNRQAATADVNTQGVLPGMVWQDRDVYLQGPIWAKIPHTDGHFHPSPLMGGFGLKHPPPQILIKNTPVPANPSTTFSAAKFASFITQYSTGQVSVEIEWELQKENSKRWNPEVQYTSNYNKSVNVDFTVDTNGVYSEPRPIGTRYLTRNL

SEQ ID NO: 579 - DNA, 2601 bp, Artificial Sequence
  Description of Artificial Sequence: Synthetic polynucleotide
ccatcgacgtcagacgcggaagcttcgatcaactacgcggacaggtaccaaaacaaatgttctcgtcacgtgggcatgaatctgatgctgtttccctgcagacaatgcgagagactgaatcagaattcaaatatctgcttcactcacggtgtcaaagactgtttagagtgctttcccgtgtcagaatctcaacccgtttctgtcgtcaaaaaggcgtatcagaaactgtgctacattcatcacatcatgggaaaggtgccagacgcttgcactgcttgcgacctggtcaatgtggacttggatgactgtgtttctgaacaataaatgacttaaaccaggtatgactgccgatggttatcttccagattggctcgaggacaaccttagtgaaggaattcgcgagtggtgggctttgaaacctggagcccctcaacccaaggcaaatcaacaacatcaagacaacgctcgaggtcttgtgcttccgggttacaaataccttggacccggcaacggactcgacaagggggagccggtcaacgcagcagacgcggcggccctcgagcacgacaaggcctacgaccagcagctcaaggccggagacaacccgtacctcaagtacaaccacgccgacgccgagttccaggagcggctcaaagaagatacgtcttttgggggcaacctcgggcgagcagtcttccaggccaaaaagaggcttcttgaacctcttggtctggttgaggaagcggctaagacggctcctggaaagaagaggcctgtagagcagtctcctcaggaaccggactcctccgcgggtattggcaaatcgggtgcacagcccgctaaaaagagactcaatttcggtcagactggcgacacagagtcagtcccagaccctcaaccaatcggagaacctcccgcagccccctcaggtgtgggatctcttacaatggcttcaggtggtggcgcaccagtggcagacaataacgaaggtgccgatggagtgggtagttcctcgggaaattggcattgcgattcccaatggctgggggacagagtcatcaccaccagcacccgaacctgggccctgcccacctacaacaatcacctctacaagcaaatctccaacagcacatctggaggatcttcaaatgacaacgcctacttcggctacagcaccccctgggggtattttgacttcaacagattccactgccacttctcaccacgtgactggcagcgactcatcaacaacaactggggattccggcctaagcaactcaacttcaagctcttcaacattcaggtcaaagaggttacggacaacaatggagtcaagaccatcgccaataaccttaccagcacggtccaggtcttcacggactcagactatcagctcccgtacgtgctcgggtcggctcacgagggctgcctcccgccgttcccagcggacgttttcatgattcctcagtacgggtatctgacgcttaatgatggaagccaggccgtgggtcgttcgtccttttactgcctggaatatttcccgtcgcaaatgctaagaacgggtaacaacttccagttcagctacgagtttgagaacgtacctttccatagcagctacgctcacagccaaagcctggaccgactaatgaatccactcatcgaccaatacttgtactatctctcaaagactattaacggttctggacagaatcaacaaacgctaaaattcagtgtggccggacccagcaacatggctgtccagggaagaaactacatacctggacccagctaccgacaacaacgtgtctcaaccactgtgactcaaaacaacaacagcgaatttgcttggcctggagcttcttcttgggctctcaatggacgtaatagcttgatgaatcctggacctgctatggccagccacaaagaaggagaggaccgtttctttcctttgtctggatctttaatttttggcaaacaaggaactggaagagacaacgtggatgcggacaaagtcatgataaccaacgaagaagaaattaaaactactaacccggtagcaacggagtcctatggacaagtggccacaaaccaccagagtgcccaagcacaggcgcagaccggctgggttcaaaaccaaggaatacttccgggtatggtttggcaggacagagatgtgtacctgcaaggacccatttgggccaaaattcctcacacggacggcaactttcacccttctccgctgatgggagggtttggaatgaagcacccgcctcctcagatcctcatcaaaaacacacctgtacctgcggatcctccaacggccttcaacaaggacaagctgaactctttcatcacccagtattctactggccaagtcagcgtggagatcgagtgggagctgcagaaggaaaacagcaagcgctggaacccggagatccagtacacttccaactattacaagtctaataatgttgaatttgctgttaatactgaaggtgtatatagtgaaccccgccccattggcaccagatacctgactcgtaatctgtaattgcttgttaatcaataaaccgtttaattcgtttcagttgaactgcggcc

SEQ ID NO: 580 - DNA, 2601 bp, Artificial Sequence
  Description of Artificial Sequence: Synthetic polynucleotide
ccatcgacgtcagacgcggaagcttcgatcaactacgcggacaggtaccaaaacaaatgttctcgtcacgtgggcatgaatctgatgctgtttccctgcagacaatgcgagagactgaatcagaattcaaatatctgcttcactcacggtgtcaaagactgtttagagtgctttcccgtgtcagaatctcaacccgtttctgtcgtcaaaaaggcgtatcagaaactgtgctacattcatcacatcatgggaaaggtgccagacgcttgcactgcttgcgacctggtcaatgtggacttggatgactgtgtttctgaacaataaatgacttaaaccaggtatggctgccgatggttatcttccagattggctcgaggacaaccttagtgaaggaattcgcgagtggtgggctttgaaacctggagcccctcaacccaaggcaaatcaacaacatcaagacaacgctcgaggtcttgtgcttccgggttacaaataccttggacccggcaacggactcgacaagggggagccggtcaacgcagcagacgcggcggccctcgagcacgacaaggcctacgaccagcagctcaaggccggagacaacccgtacctcaagtacaaccacgccgacgccgagttccaggagcggctcaaagaagatacgtcttttgggggcaacctcgggcgagcagtcttccaggccaaaaagaggcttcttgaacctcttggtctggttgaggaagcggctaagacggctcctggaaagaagaggcctgtagagcagtctcctcaggaaccggactcctccgcgggtattggcaaatcgggtgcacagcccgctaaaaagagactcaatttcggtcagactggcgacacagagtcagtcccagaccctcaaccaatcggagaacctcccgcagccccctcaggtgtgggatctcttacaatggcttcaggtggtggcgcaccagtggcagacaataacgaaggtgccgatggagtgggtagttcctcgggaaattggcattgcgattcccaatggctgggggacagagtcatcaccaccagcacccgaacctgggccctgcccacctacaacaatcacctctacaagcaaatctccaacagcacatctggaggatcttcaaatgacaacgcctacttcggctacagcaccccctgggggtattttgacttcaacagattccactgccacttctcaccacgtgactggcagcgactcatcaacaacaactggggattccggcctaagcgactcaacttcaagctcttcaacattcaggtcaaagaggttacggacaacaatggagtcaagaccatcgccaataaccttaccagcacggtccaggtcttcacggactcagactatcagctcccgtacgtgctcgggtcggctcacgagggctgcctcccgccgttcccagcggacgttttcatgattcctcagtacgggtatctgacgcttaatgatggaagccaggccgtgggtcgttcgtccttttactgcctggaatatttcccgtcgcaaatgctaagaacgggtaacaacttccagttcagctacgagtttgagaacgtacctttccatagcagctacgctcacagccaaagcctggaccgactaatgaatccactcatcgaccaatacttgtactatctctcaaagactattaacggttctggacagaatcaacaaacgctaaaattcagtgtggccggacccagcaacatggctgtccagggaagaaactacatacctggacccagctaccgacaacaacgtgtctcaaccactgtgactcaaaacaacaacagcgaatttgcttggcctggggcttcttcttgggctctcaatggacgtaatagcttgatgaatcctggacctgctatggccagccacaaagaaggagaggaccgtttctttcctttgtctggatctttaatttttggcaaacaaggaactggaagagacaacgtggatgcggacaaagtcatgataaccaacgaagaagaaattaaaactactaacccggtagcaacggagtcctatggacaagtggccacaaaccaccagagtgcccaagcacaggcgcagaccggctgggttcaaaaccaaggaatacttccgggtatggtttggcaggacagagatgtgtacctgcaaggacccatttgggccaaaattcctcacacgggcggcaactttcacccttctccgctgatgggagggtttggaatgaagcacccgcctcctcagatcctcatcaaaaacacacctgtacctgcggatcctccaacggccttcaacaaggacaagctgaactctttcatcacccagtattctactggccaagtcagcgtggagatcgagtgggagctgcagaaggaaaacagcaagcgctggaacccggagatccagtacacttccaactattacaagtctaataatgttgaatttgctgttaatactggaggtgtatatagtgaaccccgccccattggcaccagatacctgactcgtaatctgtaattgcttgttaatcaataaaccgtttaattcgtttcagttgaactgcggcc

SEQ ID NO: 581 - DNA, 2601 bp, Artificial Sequence
  Description of Artificial Sequence: Synthetic polynucleotide
ccatcgacgtcagacgcggaagcttcgatcaactacgcggacaggtaccaaaacaaatgttctcgtcacgtgggcatgaatctgatgctgtttccctgcagacaatgcgagagactgaatcagaattcaaatatctgcttcactcacggtgtcaaagactgtttagagtgctttcccgtgtcagaatctcaacccgtttctgtcgtcaaaaaggcgtatcagaaactgtgctacattcatcacatcatgggaaaggtgccagacgcttgcactgcttgcgacctggtcaatgtggactcggatgactgtgtttctgaacaataaatgacttaaaccaggtatggctgccgatggttatcttccagattggctcgaggacaaccttagtgaaggaattcgcgagtggtgggctttgaaacctggagcccctcaacccaaggcaaatcaacaacatcaagacaacgctcgaggtcttgtgcttccgggttacaaataccttggacccggcaacggactcgacaagggggagccggtcaacgcagcagacgcggcggccctcgagcacgacaaggcctacgaccagcagctcaaggccggagacaacccgtacctcaagtacaaccacgccgacgccgagttccaggagcggctcaaagaagatacgtcttttgggggcaacctcgggcgagcagtcttccaggccaaaaagaggcttcttgaacctcttggtctggttgaggaagcggctaagacggctcctggaaagaagaggcctgtagagcagtctcctcaggaaccggactcctccgcgggtattgacaaatcgggtgcacagcccgctaaaaagagactcaatttcggtcagactggcgacacagagtcagtcccagaccctcaaccaatcggagaacctcccgcagccccctcaggtgtgggatctcttacaatggcttcaggtggtggcgcaccagtggcagacaataacgaaggtgccgatggagtgggtagttcctcgggaaattggcattgcgattcccaatggctgggggacagagtcatcaccaccagcacccgaacctgggccctgcccacctacaacaatcacctctacaagcaaatctccaacagcacatctggaggatcttcaaatgacaacgcctacttcggctacagcaccccctgggggtattttgacttcaacagattccactgccacttctcaccacgtgactggcagcgactcatcaacaacaactggggattccggcctaagcgactcaacttcaagctcttcaacattcaggtcaaagaggttacggacaacaatggagtcaagaccatcgccaataaccttaccagcacggtccaggtcttcacggactcggactatcagctcccgtacgtgctcgggtcggctcacgagggctgcctcccgccgttcccagcggacgttttcatgattcctcagtacgggtatctgacgcttaatgatggaagccaggccgtgggtcgttcgtccttttactgcctggaatatttcccgtcgcaaatgctaagaacgggtaacaacttccagttcagctacgagtttgagaacgtacctttccatagcagctacgctcacagccaaagcctggaccgactaatgaatccactcatcgaccaatacttgtactatctctcaaagactattaacggttctggacagaatcaacaaacgctaaaattcagtgtggccggacccagcaacatggctgtccagggaagaaactacatacctggacccagctaccgacaacaacgtgtctcaaccactgtgactcaaaacaacaacagcgaatttgcttggcctggagcttcttcttgggctctcaatggacgtaatagcttgatgaatcctggacctgctatggccagccacaaagaaggagaggaccgtttctttcctttgtctggatctttaatttttggcaaacaaggaactggaagagacaacgtggatgcggacaaagtcatgataaccaacgaagaagaaattaaaactactaacccggtagcaacggagtcctatggacaagtggccacaaaccaccagagtgcccaagcacaggcgcagaccggctgggttcaaaaccaaggaatacttccgggtatggtttggcaggacagagatgtgtacctgcaaggacccatttgggccaaaattcctcacacggacggcaactttcacccttctccgctgatgggagggtttggaatgaagcacccgcctcctcagatcctcatcaaaaacacacctgtacctgcggatcctccaacggccttcaacaaggacaagctgaactctttcatcacccagtattctactggccaagtcagcgtggagatcgagtgggagctgcagaaggaaaacagcaagcgctggaacccggagatccagtacacttccaactattacaagtctaataatgttgaatttgctgttaatactgaaggtgtatatagtgaaccccgccccattggcaccagatacctgactcgtaatctgtaattgcttgttaatcaataaaccgtttaattcgtttcagttgaactgcggcc

SEQ ID NO: 582 - DNA, 2601 bp, Artificial Sequence
  Description of Artificial Sequence: Synthetic polynucleotide
ccatcgacgtcagacgcggaagcttcgatcaactacgcggacaggtaccaaaacaaatgttctcgtcacgtgggcatgaatctgatgctgtttccctgcagacaatgcgagagactgaatcagaattcaaatatctgcttcactcacggtgtcaaagactgtttagagtgctttcccgtgtcagaatctcaacccgtttctgtcgtcaaaaaggcgtatcagaaactgtgctacattcatcacatcatgggaaaggtgccagacgcttgcactgcttgcgacctggtcaatgtggacttggatgactgtgtttctgaacaataaatgacttaaaccaggtatggctgccgatggttatcttccagattggctcgaggacaaccttagtgaaggaattcgcgagtggtgggctttgaaacctggagcccctcaacccaaggcaaatcaacaacatcaagacaacgctcgaggtcttgtgcttccgggttacaaataccttggacccggcaacggactcgacaagggggagccggtcaacgcagcagacgcggcggccctcgagcacgacaaggcctacgaccagcagctcaaggccggagacaacccgtacctcaagtacaaccacgccgacgccgagttccaggagcggctcaaagaagatacgtcttttgggggcaacctcgggcgagcagtcctccaggccaaaaagaggcttcttgaacctcttggtctggttgaggaagcggctaagacggctcctggaaagaagaggcctgtagagcagtctcctcaggaaccggactcctccgcgggtattggcaaatcgggtgcacagcccgctaaaaagagactcaatttcggtcagactggcgacacagagtcagtcccagaccctcaaccaatcggagaacctcccgcagccccctcaggtgtgggatctcttacaatggcttcaggtggtggcgcaccagtggcagacaataacgaaggtgccgatggagtgggtagttcctcgggaaattggcattgcgattcccaatggctgggggacagagtcatcaccaccagcacccgaacctgggccctgcccacctacaacaatcacctctacaagcaaatctccaacagcacatctggaggatcttcaaatgacaacgcctacttcggctacagcaccccctgggggtattttgacttcaacagattccactgccacttctcaccacgtgactggcagcgactcatcaacaacaactggggattccggcctaagcgactcaacttcaagctcttcaacattcaggtcaaagaggttacggacaacaatggagtcaagaccatcgccaataaccttaccagcacggtccaggtcttcacggactcagactatcagctcccgtacgtgctcgggtcggctcacgagggctgcctcccgccgttcccagcggacgttttcatgattcctcagtacgggtatctgacgcttaatgatggaagccaggccgtgggtcgttcgtccttttactgcctggaatatttcccgtcgcaaatgctaagaacgggtaacaacttccagttcagctacgagtttgagaacgtacctttccatagcagctacgctcacagccaaagcctggaccgactaatgaatccactcatcgaccaatacttgtactatctctcaaagactattaacggttctggacagaatcaacaaacgctaaaattcagtgtggccggatccagcaacatggctgtccagggaagaaactacatacctggacccagctaccgacaacaacgtgtctcaaccactgtgactcaaaacaacaacagcgaatttgcttggcctggagcttcttcttgggctctcaatggacgtaatagcttgatgaatcctggacctgctatggccagccacaaagaaggagaggaccgtttctttcctttgtctggatctttaatttttggcaaacaaggaactggaagagacaacgtggatgcggacaaagtcatgataaccaacgaagaagaaattaaaactactaacccggtagcaacggagtcctatggacaagtggccacaaaccaccagagtgcccaagcacaggcgcagaccggctgggttcaaaaccaaggaatacttccaggtatggtttggcaggacagagatgtgtacctgcaaggacccatttgggccaaaattcctcacacggacggcaactttcacccttctccgctgatgggagggtttggaatgaagcacccgcctcctcagatcctcatcaaaaacacacctgtacctgcggatcctccaacggccttcaacaaggacaagctgaactctttcatcacccagtattctactggccaagtcagcgtggagatcgagtgggagctgcagaaggaaaacagcaagcgctggaacccggagatccagtacacttccaactattacaagtctaataatgttgaatttgctgttaatactgaaggtgtatatagtgaaccccgccccattggcaccagatacctgactcgtaatctgtaattgcttgttaatcaataaaccgtttaattcgtttcagttgaactgcggcc

SEQ ID NO: 583 - DNA, 2601 bp, Artificial Sequence
  Description of Artificial Sequence: Synthetic polynucleotide
ccatcgacgtcagacgcggaagcttcgatcaactacgcggacaggtaccaaaacaaatgttctcgtcacgtgggcatgaatctgatgctgtttccctgcagacaatgcgagagactgaatcagaattcaaatatctgcttcactcacggtgtcaaagactgtttagagtgctttcccgtgtcagaatctcaacccgtttctgtcgtcaaaaaggcgtatcagaaactgtgctacattcatcacatcatgggaaaggtgccagacgcttgcactgcttgcgacctggtcaatgtggacttggatgactgtgtttctgaacaataaatgacttaaaccaggtatggctgccgatggttatcttccagattggctcgaggacaaccttagtgaaggaattcgcgagtggtgggctttgaaacctggagcccctcaacccaaggcaaatcaacaacatcaagacaacgctcgaggtcttgtgcttccgggttacaaataccttggacccggcaacggactcgacaagggggagccggtcaacgcagcagacgcggcggccctcgagcacgacagggcctacgaccagcagctcaaggccggagacaacccgtacctcaagtacaaccacgccgacgccgagttccaggagcggctcaaagaagatacgtcttttgggggcaacctcgggcgagcagtcttccaggccaaaaagaggcttcttgaacctcttggtctggttgaggaagcggctaagacggctcctggaaagaagaggcctgtagagcagtctcctcaggaaccggactcctccgcgggtattggcaaatcgggtgcacagcccgctaaaaagagactcaatttcggtcagactggcgacacagagtcagtcccagaccctcaaccaatcggagaacctcccgcagccccctcaggtgtgggatctcttacaatggcttcaggtggtggcgcaccagtggcagacaataacgaaggtgccgatggagtgggtagttcctcgggaaattggcattgcgattcccaatggctgggggacagagtcatcaccaccagcacccgaacctgggccctgcccacctacaacaatcacctctacaagcaaatctccaacagcacatctggaggatcttcaaatgacaacgcctacttcggctacagcaccccctgggggtattttgacttcaacagattccactgccacttctcaccacgtgactggcagcgactcatcaacaacaactggggattccggcctaagcgactcaacttcaagctcttcaacattcaggtcaaagaggttacggacaacaatggagtcaagaccatcgccaataaccttaccagcacggtccaggtcttcacggactcagactatcagctcccgtacgtgctcgggtcggctcacgagggctgcctcccgccgttcccagcggacgttttcatgattcctcagtacgggtatctgacgcttaatgatggaagccaggccgtgggtcgttcgtccttttactgcctggaatatttcccgtcgcaaatgctaagaacgggtaacaacttccagttcagctacgagtttgagaacgtacctttccatagcagctacgctcacagccaaagcctggaccgactaatgaatccactcatcgaccaatacttgtactatctctcaaagactattaacggttctggacagaatcaacaaacgctaaaattcagtgtggccggacctagcaacatggctgtccagggaagaaactacatacctggacccagctaccgacaacaacgtgtctcaaccactgtgactcaaaacaacaacagcgaatttgcttggcctggagcttcttcttgggctctcaatggacgtaatagcttgatgaatcctggacctgctatggccagccacaaagaaggagaggaccgtttctttcctttgtctggatctttaatttttggcaaacaaggaactggaagagacaacgtggatgcggacaaagtcatgataaccaacgaagaagaaattaaaactactaacccggtagcaacggagtcctatggacaagtggccacaaaccaccagagtgcccaagcacaggcgcagaccggctgggttcaaaaccaaggaatacttccgggtatggtttggcaggacagagatgtgtacctgcaaggacccatttgggccaaaattcctcacacggacggcaactttcacccttctccgctgatgggagggtttggaatgaagcacccgcctcctcagatcctcatcaaaaacacacctgtacctgcggatcctccaacggccttcaacaaggacaagctgaactctttcatcacccagtattctactggccaagtcagcgtggagatcgagtgggagctgcagaagaaaaacagcaagcgctggaacccggagatccagtacacttccaactattacaagtctaataatgttgaatttgctgttaacactgaaggtgtatatagtgaaccccgccccattggcaccagatacctgactcgtaatctgtaattgcttgttaatcaataaaccgtttaattcgtttcagttgaactgcggcc

SEQ ID NO: 584 - DNA, 2601 bp, Artificial Sequence
  Description of Artificial Sequence: Synthetic polynucleotide
ccatcgacgtcagacgcggaagcttcgatcaactacgcggacaggtaccaaaacaaatgttctcgtcacgtgggcatgaatctgatgctgtttccctgcagacaatgcgagagactgaatcagaattcaaatatctgcttcactcacggtgtcaaagactgtttagagtgctttcccgtgtcagaatctcaacccgtttctgtcgtcaaaaaggcgtatcagaaactgtgctacattcatcacatcatgggaaaggtgccagacgcttgcactgcttgcgacctggtcaatgtggacttggatgactgtgtttctgaacaataaatgacttaaaccaggtatggctgccgatggttatcttccagattggctcgaggacaaccttagtgaaggaattcgcgagtggtgggctttgaaacctggagcccctcaacccaaggcaaatcaacaacatcaagacaacgctcgaggtcttgtgcttccgggttacaaataccttggacccggcaacggactcgacaagggggagccggtcaacgcagcagacgcggcggccctcgagcacgacaaggcctacgaccagcagctcaaggccggagacaacccgtacctcaagtacaaccacgccgacgccgagttccaggagcggctcaaagaagatacgtcttttgggggcaacctcgggcgagcagtcttccaggccaaaaagaggcttcttgaacctcttggtctggttgaggaagcggctaagacggctcctggaaagaagaggcctgtagagcagtctcctcaggaaccggactcctccgcgggtattggcaaatcgggtgcacagcccgctaaaaagagactcaatttcggtcagactggcgacacagagtcagtcccagaccctcaaccaatcggagaacctcccgcagccccctcaggtgtgggatctcttacaatggcttcaggtggtggcgcaccagtggcagacaataacgaaggtgccgatggagtgggtagttcctcgggaaattggcattgcgattcccaatggctgggggacagagtcatcaccaccagcacccgaacctgggccctgcccacctacaacaatcacctctacaagcaaatctccaacagcacatctggaggatcttcaaatgacaacgcctacttcggctacagcaccccctgggggtattttgacttcaacagattccactgccacttctcaccacgtgactggcagcgactcatcaacaacaactggggattccggcctaagcgactcaacttcaagctcttcaacattcaggtcaaagaggttacggacaacaatggagtcaagaccatcgccaataaccttaccagcacggtccaggtcttcacggactcagactatcagctcccgtacgtgctcgggtcggctcacgagggctgcctcccgccgttcccagcggacgttttcatgattcctcagtacgggtatctgacgcttaatgatggaagccaggccgtgggtcgttcgtccttttactgcctggaatatttcccgtcgcaaatgctaagaacgggtaacaacttccagttcagctacgagtttgagaacgtacctttccatagcagctacgctcacagccaaagcctggaccgactaatgaatccactcatcgaccaatacttgtactatctctcaaagactattaacggttctggacagaatcaacaaacgctaaaattcagtgtggccggacccagcaacatggctgtccagggaagaaactacatacctggacccagctaccgacaacaacgtgtctcaaccactgtgactcaaaacaacaacagcgaatttgcttggcctggagcttcttcttgggctctcaatggacgtaatagcttgatgaatcctggacctgctatggccagccacaaagaaggagaggaccgtttctttcctttgtctggatctttaatttttggcaaacaaggaactggaagagacaacgtggatgcggacaaagtcatgataaccaacgaagaagaaattaaaactactaacccggtagcaacggagtcctatggacaagtggccacaaaccaccagagtgcccaagcacgggcgcagaccggctgggttcaaaaccaaggaatacttccgggtatggtttggcaggacagagatgtgtacctgcaaggacccatttgggccaaaattcctcacacggacggcaactttcacccttctccgctgatgggagggtttggaatgaagcacccgcctcctcagatcctcatcaaaaacacacctgtacctgcggatcctccaacggccttcaacaaggacaagctgaactctttcatcacccagtattctactggccaagtcagcgtggagatcgagtgggagctgcagaaggaaaacagcaagcgctggaacccggagatccagtacacttccaactattacaagtctaataatgttgaatttgctgttaatactgaaggtgtatatagtgaaccccgccccattggcaccagatacctgactcgtaatctgtaattgcttgttaatcaataaaccgtttaattcgtttcagttgaactgcggcc

SEQ ID NO: 585 - DNA, 2601 bp, Artificial Sequence
  Description of Artificial Sequence: Synthetic polynucleotide
ccatcgacgtcagacgcggaagcttcgatcaactacgcggacaggtaccaaaacaaatgttctcgtcacgtgggcatgaatctgatgctgtttccctgcagacaatgcgagagactgaatcagaattcaaatatctgcttcactcacggtgtcaaagactgtttagagtgctttcccgtgtcagaatctcaacccgtttctgtcgtcaaaaaggcgtatcagaaactgtgctacattcatcacatcatgggaaaggtgccagacgcttgcactgcttgcgacctggtcaatgtggacttggatgactgtgtttctgaacaataaatgacttaaaccaggtatggctgccgatggttatcttccagattggctcgaggacaaccttagtgaaggaattcgcgagtggtgggctttgaaacctggagcccctcaacccaaggcaaatcaacaacatcaagacaacgctcgaggtcttgtgcttccgggttacaaataccttggacccggcaacggactcgacaagggggagccggtcaacgcagtagacgcggcggccctcgagcacgacaaggcctacgaccagcagctcaaggccggagacaacccgtacctcaagtacaaccacgccgacgccgagttccaggagcggctcaaagaagatacgtcttttgggggcaacctcgggcgagcagtcttccaggccaaaaagaggcttcttgaacctcttggtctggttgaggaagcggctaagacggctcctggaaagaagaggcctgtagagcagtctcctcaggaaccggactcctccgcgggtattggcaaatcgggtgcacagcccgctaaaaagagactcaatttcggtcagactggcgacacagagtcagtcccagaccctcaaccaatcggagaacctcccgcagccccctcaggtgtgggatctcttacaatggcttcaggtggtggcgcaccagtggcagacaataacgaaggtgccgatggagtgggtagttcctcgggaaattggcattgcgattcccaatggctgggggacagagtcatcaccaccagcacccgaacctgggccctgcccacctacaacaatcacctctacaagcaaatctccaacagcacatctggaggatcttcaaatgacaacgcctacttcggctacagcaccccctgggggtattttgacttcaacagattccactgccacttctcaccacgtgactggcagcgactcatcaacaacaactggggatttcggcctaagcgactcaacttcaagctcttcaacattcaggtcaaagaggttacggacaacaatggagtcaagaccatcgccaataaccttaccagcacggtccaggtcttcacggactcagactatcagctcccgtacgtgctcgggtcggctcacgagggctgcctcccgccgttcccagcggacgttttcatgattcctcagtacgggtatctgacgcttaatgatggaagccaggccgtgggtcgttcgtccttttactgcctggaatatttcccgtcgcaaatgctaagaacgggtaacaacttccagttcagctacgagtttgagaacgtacctttccatagcagctacgctcacagccaaagcctggaccgactaatgaatccactcatcgaccaatacttgtactatctctcaaagactattaacggttctggacagaatcaacaaacgctaaaattcagtgtggccggacccagcaacatggctgtccagggaagaaactacatacctggacccagctaccgacaacaacgtgtctcaaccactgtgactcaaaacaacaacagcgaatttgcttggcctggagcttcttcttgggctctcaatggacgtaatagcttgatgaatcctggacctgctatggccagccacaaagaaggagaggaccgtttctttcctttgtctggatctttaatttttggcaaacaaggaactggaagagacaacgtggatgcggacaaagtcatgataaccaacgaagaagaaattaaaactactaacccggtagcaacggagtcctatggacaagtggccacaaaccaccagagtgcccaagcacaggcgcagaccggctgggttcaaaaccaaggaatacttccgggtatggtttggcaggacagagatgtgtacctgcaaggacccatttgggccaaaattcctcacacggacggcaactttcacccttctccgctgatgggagggtttggaatgaagcacccgcctcctcagatcctcatcaaaaacacacctgtacctgcggatcctccaacggccttcaacaaggacaagctgaactctttcatcacccagtattctactggccaagtcagcgtggagatcgagtgggagctgcagaaggaaaacagcaagcgctggaacccggagatccagtacacttccaactattacaagtctaataatgttgaatttgctgttaatactgaaggtgtatatagtgaaccccgccccattggcaccagatacctgactcgtaatctgtaattgcttgttaatcaataaaccgtttaattcgtttcagttgaactgcggcc

SEQ ID NO: 586 - DNA, 2580 bp, Artificial Sequence
  Description of Artificial Sequence: Synthetic polynucleotide
ccatcgacgtcagacgcggaagcttcgatcaactacgcggacaggtaccaaaacaaatgttctcgtcacgtgggcatgaatctgatgctgtttccctgcagacaatgcgagagactgaatcagaattcaaatatctgcttcactcacggtgtcaaagactgtttagagtgctttcccgtgtcagaatctcaacccgtttctgtcgtcaaaaaggcgtatcagaaactgtgctacattcatcacatcatgggaaaggtgccagacgcttgcactgcttgcgacctggtcaatgtggacttggatgactgtgtttctgaacaataaatgacttaaaccaggtatggctgccgatggttatcttccagattggctcgaggacaaccttagtgaaggaattcgcgagtggtgggctttgaaacctggagcccctcaacccaaggcaaatcaacaacatcaagacaacgctcgaggtcttgtgcttccgggttacaaataccttggacccggcaacggactcgacaagggggagccggtcaacgcagcagacgcggcggccctcgagcacgacaaggcctacgaccagcagctcaaggccggagacaacccgtacctcaagtacaaccacgccgacgccgagttccaggagcggctcaaagaagatacgtcttttgggggcaacctcgggcgagcagtcttccaggccaaaaagaggcttcttgaacctcttggtctggttgaggaagcggctaagacggctcctggaaagaagaggcctgtagagcagtctcctcgggaaccggactcctccgcgggtattggcaaatcgggtgcacagcccgctaaaaagagactcaatttcggtcagactggcgacacagagtcagtcccagaccctcaaccaatcggagaacctcccgcagccccctcaggtgtgggatctcttacaatggcttcaggtggtggcgcaccagtggcagacaataacgaaggtgccgatggagtgggtagttcctcgggaaattggcattgcgattcccaatggctgggggacagagtcatcaccaccagcacccgaacctgggccctgcccacctacaacaatcacctctacaagcaaatctccaacagcacatctggaggatcttcaaatgacaacgcctacttcggctacagcaccccctgggggtattttgacttcaacagattccactgccacttctcaccacgtgactggcagcgactcatcaacaacaactggggattccggcctaagcgactcaacttcaagctcttcaacattcaggtcaaagaggttacggacaacaatggagtcaagaccatcgccaataaccttaccagcacggtccaggtcttcacggactcagactatcagctcccgtacgtgctcgggtcggctcacgagggctgcctcccgccgttcccagcggacgttttcatgattcctcagtacgggtatctgacgcttaatgatggaagccaggccgtgggtcgttcgtccttttactgcctggaatatttcccgtcgcaaatgctaagaacgggtaacaacttccagttcagctacgagtttgagaacgtacctttccatagcagctacgctcacagccaaagcctggaccgactaatgaatccactcatcgaccaatacttgtactatctctcaaagactattaacggttctggacagaatcaacaaacgctaaaattcagtgtggccggacccagcaacatggctgtccagggaagaaactacatacctggacccagctaccgacaacaacgtgtctcaaccactgtgactcaaaacaacaacagcgaatttgcttggcctggagcttcttcttgggctctcaatggacgtaatagcttgatgaatcctggacctgctatggccagccacaaagaaggagaggaccgtttctttcctttgtctggatctttaatttttggcaaacaaggaactggaagagacaacgtggatgcggacaaagtcatgataaccaacgaagaagaaattaaaactactaacccggtagcaacggagtcctatggacaagtggccacaaaccaccagagtgcccaagcacaggcgcagaccggctgggttcaaaaccaaggaatacttccgggtatggtttggcaggacagagatgtgtacctgcaaggacccatttgggccaaaattcctcacacggacggcaactttcacccttctccgctgatgggagggtttggaatgaagcacccgcctcctcagatcctcatcaaaaacacacctgtacctgcggatcctccaacggccttcaacaaggacaagctgaactctttcatcacccagtattctactggccaagtcagcgtggagatcgagtgggaactgcagaaggaaaacagcaagcgctggaacccggagatccagtacacttccaactattacaagtctaataatgttgaatttgctgttaatactgaaggtgtatatagtgaaccccgccccattggcaccagatacctgactcgtaatctgtaattgcttgttaatcaataaaccgtttaatt

SEQ ID NO: 587 - DNA, 2601 bp, Artificial Sequence
  Description of Artificial Sequence: Synthetic polynucleotide
ccatcgacgtcagacgcggaagcttcgatcaactacgcggacaggtaccaaaacaaatgttctcgtcacgtgggcatgaatctgatgctgtttccctgcagacaatgcgagagactgaatcagaattcaaatatctgcttcactcacggtgtcaaagactgtttagagtgctttcccgtgtcagaatctcaacccgtttctgtcgtcaaaaaggcgtatcagaaactgtgctacattcatcacatcatgggaaaggtgccagacgcttgcactgcttgcgacctggtcaatgtggacttggatgactgtgtttctgaacaataaatgacttaaaccaggtatggctgccgatggttatcttccagattggctcgaggacaaccttagtgaaggaattcgcgagtggtgggctttgaaacctggagcccctcaacccaaggcaaatcaacaacatcaagacaacgctcgaggtcttgtgcttccgggttacaaataccttggacccggcaacggactcgacaagggggagccggtcaacgcagcagacgcggcggccctcgagcacgacaaggcctacgaccagcagctcaaggccggagacaacccgtacctcaagtacaaccacgccgacgccgagttccaggagcggctcaaagaagatacgtcttttgggggcaacctcgggcgagcagtctttcaggccaaaaagaggcttcttgaacctcttggtctggttgaggaagcggctaagacggctcctggaaagaagaggcctgtagagcagtctcctcaggaaccggactcctccgcgggtattggcaaatcgggtgcacagcccgctaaaaagagactcaatttcggtcagactggcgacacagagtcagtcccagaccctcaaccaatcggagaacctcccgcagccccctcaggtgtgggatctcttacaatggcttcatgtggtggcgcaccagtggcagacaataacgaaggtgccgatggagtgggtagttcctcgggaaattggcattgcgattcccaatggctgggggacagagtcatcaccaccagcacccgaacctgggccctgcccacctacaacaatcacctctacaagcaaatctccaacagcacatctggaggatcttcaaatgacaacgcctacttcggctacagcaccccctgggggtattttgacttcaacagattccactgccacttctcaccacgtgactggcagcgactcatcaacaacaactggggattccggcctaagcgactcaacttcaagctcttcaacattcaggtcaaagaggttacggacaacaatggagtcaagaccatcgccaataaccttaccagcacggtccaggtcttcacggactcagactatcagctcccgtacgtgctcgggtcggctcacgagggctgcctcccgccgttcccagcggacgttttcatgattcctcagtacgggtatctgacgcttaatgatggaagccaggccgtgggtcgttcgtccttttactgcctggaatatttcccgtcgcaaatgctaagaacgggtaacaacttccagttcagctacgagtttgagaacgtacctttccatagcagctacgctcacagccaaagcctggaccgactaatgaatccactcatcgaccaatacttgtactatctctcaaagactattaacggttctggacagaatcaacaaacgctaaaattcagtgtggccggacccagcaacatggctgtccagggaagaaactacatacctggacccagctaccgacaacaacgtgtctcaaccactgtgactcaaaacaacaacagcgaatttgcttggcctggagcttcttcttgggctctcaatggacgtaatagcttgatgaatcctggacctgctatggccagccacaaagaaggagaggaccgtttctttcctttgtctggatctttaatttttggcaaacaaggaactggaagagacaacgtggatgcggacaaagtcatgataaccaacgaagaagaaattaaaactactaacccggtagcaacggagtcctatggacaagtggccacaaaccaccagagtgcccaagcacaggcgcagaccggctgggttcaaaaccaaggaatacttccgggtatggtttggcaggacagagatgtgtacctgcaaggacccatttgggccaaaattcctcacacggacggcaactttcacccttctccgctgatgggagggtttggaatgaagcacccgcctcctcagatcctcatcaaaaacacacctgtacctgcggatcctccaacggccttcaacaaggacaagctgaactctttcatcacccagtattctactggccaagtcagcgtggagatcgagtgggagctgcagaaggaaaacagcaagcgctggaacccggagatccagtacacttccaactattacaagtctaataatgttgaatttgctgttaatactgaaggtgtatatagtgaaccccgccccattggcaccagatacctgactcgtaatctgtaattgcttgttaatcaataaaccgtttaattcgtttcagttgaactgcggcc

SEQ ID NO: 588 - DNA, 2601 bp, Artificial Sequence
  Description of Artificial Sequence: Synthetic polynucleotide
ccatcgacgtcagacgcggaagcttcgatcaactacgcggacaggtaccaaaacaaatgttctcgtcacgtgggcatgaatctgatgctgtttccctgcagacaatgcgagagactgaatcagaattcaaatatctgcttcactcacggtgtcaaagactgtttagagtgctttcccgtgtcagaatctcaacccgtttctgtcgtcaaaaaggcgtatcagaaactgtgctacattcatcacatcatgggaaaggtgccagacgcttgcactgcttgcgacctggtcaatgtggacttggatgactgtgtttctgaacaataaatgacttaaaccaggtatggctgccgatggttatcttccagattggctcgaggacaaccttagtgaaggaattcgcgagtggtgggctttgaaacctggagcccctcaacccaaggcaaatcaacaacatcaagacaacgctcgaggtcttgtgcttccgggttacaaataccttggacccggcaacggactcgacaagggggagccgatcaacgcagcagacgcggcggccctcgagcacgacaaggcctacgaccagcagctcaaggccggagacaacccgtacctcaagtacaaccacgccgacgccgagttccaggagcggctcaaagaagatacgtcttttgggggcaacctcgggcgagcagtcttccaggccaaaaagaggcttcttgaacctcttggtctggttgaggaagcggctaagacggctcctggaaagaagaggcctgtagagcagtctcctcaggaaccggactcctccgcgggtattggcaaatcgggtgcacagcccgctaaaaagagactcaatttcggtcagactggcgacacagagtcagtcccagaccctcaaccaatcggagaacctcccgcagccccctcaggtgtgggatctcttacaatggcttcaggtggtggcgcaccagtggcagacaataacgaaggtgccgatggagtgggtagttcctcgggaaattggcattgcgattcccaatggctgggggacagagtcatcaccaccagcacccgaacctgggccctgcccacctacaacaatcacctctacaagcaaatctccaacagcacatctggaggatcttcaaatgacaacgcctacttcggctacagcaccccctgggggtattttgacttcaacagattccactgccacttctcaccacgtgactggcagcgactcatcaacaacaactggggattccggcctaagcgactcaacttcaagctcttcaacattcaggtcaaagaggttacggacaacaatggagtcaagaccatcgccaataaccttaccagcacggtccaggtcttcacggactcagactatcagctcccgtacgtgctcgggtcggctcacgagggctgcctcccgccgttcccagcggacgttttcatgattcctcagtacgggtatctgacgcttaatgatggaagccaggccgtgggtcgttcgtccttttactgcctggaatatttcccgtcgcaaatgctaagaacgggtaacaacttccagttcagctacgagtttgagaacgtacctttccatagcagctacgctcacagccaaagcctggaccgactaatgaatccactcatcgaccaatacttgtactatctctcaaagactattaacggttctggacagaatcaacaaacgctaaaattcagtgtggccggacccagcaacatggctgtccagggaagaaactacatacctggacccagctaccgacaacaacgtgtctcaaccactgtgactcaaaacaacaacagcgaatttgcttggcctggagcttcttcttgggctctcaatggacgtaatagcttgatgaatcctggacctgctatggccagccacaaagaaggagaggaccgtttctttcctttgtctggatctttaatttttggcaaacaaggaactggaagagacaacgtggatgcggacaaagtcatgataaccaacgaagaagaaattaaaactactaacccggtagcaacggagtcctatggacaagtggccacaaaccaccagagtgcccaagcacaggcgcagaccggctgggttcaaaaccaaggaatacttccgggtatggtttggcaggacagagatgtgtacctgcaaggacccatttgggccaaaattcctcacacgtacggcaactttcacccttctccgctgatgggagggtttggaatgaagcacccgcctcctcagatcctcatcaaaaacacacctgtacctgcggatcctccaacggccttcaacaaggacaagctgaactctttcatcacccagtattctactggccaagtcagcgtggagatcgagtgggagctgcagaaggaaaacagcaagcgctggaacccggagatccagtacacttccaactattacaagtctaataatgttgaatttgctgttaatactgaaggtgtatatagtgaaccccgccccattggcaccagatacctgactcgtaatctgtaattgcttgttaatcaataaaccgtttaattcgtttcagttgaactgcggcc

SEQ ID NO: 589 - DNA, 2601 bp, Artificial Sequence
  Description of Artificial Sequence: Synthetic polynucleotide
ccatcgacgtcagacgcggaagcttcgatcaactacgcggacaggtaccaaaacaaatgttctcgccacgtgggcatgaatctgatgctgtttccctgcagacaatgcgagagactgaatcagaattcaaatatctgcttcactcacggtgtcaaagactgtttagagtgctttcccgtgtcagaatctcaacccgtttctgtcgtcaaaaaggcgtatcagaaactgtgctacattcatcacatcatgggaaaggtgccagacgcttgcactgcttgcgacctggtcaatgtggacttggatgactgtgtttctgaacaataaatgacttaaaccaggtatggctgccgatggttatcttccagattggctcgaggacaaccttagtgaaggaattcgcgagtggtgggctttgaaacctggagcccctcaacccaaggcaaatcaacaacatcaagacaacgctcgaggtcttgtgcttccgggttacaaataccttggacccggcaacggactcgacaagggggagccggtcaacgcagcagacgcggcggccctcgagcacgacaaggcctacgaccagcagctcaaggccggagacaacccgtacctcaagtacaaccacgccgacgccgagttccaggagcggctcaaagaagatacgtcttttgggggcaacctcgggcgagcagtcttccaggccaaaaagaggcttcttgaacctcttggtctggttgaggaagcggctaagacggctcctggaaagaagaggcctgtagagcagtctcctcaggaaccggactcctccgcgggtattggcaaatcgggtgcacagcccgctaaaaagagactcaatttcggtcagactggcgacacagagtcagtcccagaccctcaaccaatcggagaacctcccgctgccccctcaggtgtgggatctcttacaatggcttcaggtggtggcgcaccagtggcagacaataacgaaggtgccgatggagtgggtagttcctcgggaaattggcattgcgattcccaatggctgggggacagagtcatcaccaccagcacccgaacctgggccctgcccacctacaacaatcacctctacaagcaaatctccaacagcacatctggaggatcttcaaatgacaacgcctacttcggctacagcaccccctgggggtattttgacttcaacagattccactgccacttctcaccacatgactggcagcgactcatcaacaacaactggggattccggcctaagcgactcaacttcaagctcttcaacattcaggtcaaagaggttacggacaacaatggagtcaagaccatcgccaataaccttaccagcacggtccaggtcttcacggactcagactatcagctcccgtacgtgctcgggtcggctcacgagggctgcctcccgccgttcccagcggacgttttcatgattcctcagtacgggtatctgacgcttaatgatggaagccaggccgtgggtcgttcgtccttttactgcctggaatatttcccgtcgcaaatgctaagaacgggtaacaacttccagttcagctacgagtttgagaacgtacctttccatagcagctacgctcacagccaaagcctggaccgactaatgaatccactcatcgaccaatacttgtactatctctcaaagactattaacggttctggacagaatcaacaaacgctaaaattcaatgtggccggacccagcaacatggctgtccagggaagaaactacatacctggacccagctaccgacaacaacgtgtctcaaccactgtgactcaaaacaacaacagcgaatttgcctggcctagagcttcttcttgggctctcaatggacgtaatagcttgatgaatcctggacctgctatggccagccacaaagaaggagaggaccgtttctttcctttgtctggatctttaatttttggcaaacaaggaactggaagagacaacgtggatgcggacaaagtcatgataaccaacgaagaagaaattaaaactactaacccggtagcaacggagtcctatggacaagtggccacaaaccaccagagtgcccaagcacaggcgcagaccggctgggttcaaaaccaaggaatacttccgggtatggtttggcaggacagagatgtgtacctgcaaggacccatttgggccaaaattcctcacacggacggcaactttcacccttctccgctgatgggagggtttggaatgaagcacccgcctcctcagatcctcatcaaaaacacacctgtacctgcggatcctccaacggccttcaacaaggacaagctgaactctttcatcacccagtattctactggccaagtcagcatggagatcgagtgggagctgcagaaggaaaacagcaagcgctggaacccggagatccagtacacttccaactattacaagtctaataatgttgaatttgctgttaatactgaaggtgtatatagtgaaccccgccccattggcaccagatacctgactcgtaatctgtaattgcttgttaatcaataaaccgtttaattcgtttcagttgaactgcggcc

SEQ ID NO: 590 - DNA, 2601 bp, Artificial Sequence
  Description of Artificial Sequence: Synthetic polynucleotide
ccatcgacgtcagacgcggaagcttcgatcaactacgcggacaggtaccaaaacaaatgttctcgtcacgtgggcatgaatctgatgctgtttccctgcagacaatgcgagagactgaatcagaattcaaatatctgcttcactcacggtgtcaaagactgtttagagtgctttcccgtgtcagaatctcaacccgtttctgtcgtcaaaaaggcgtatcagaaactgtgctacattcatcacatcatgggaaaggtgccagacgcttgcactgcttgcgacctggtcaatgtggacttggatgactgtgtttctgaacaataaatgacttaaaccaggtatggctgccgatggttatcttccagattggctcgaggacaaccttagtgaaggaattcgcgagtggtgggctttgaaacctggagcccctcaacccaaggcaaatcaacaacatcaagacaacgctcgaggtcttgtgcttccgggttacaaataccttggacccggcaacggactcgacaagggggagccggtcaacgcagcagacgcggcggccctcgagcacgacaaggcctacgaccagcagctcaaggccggagacaacccgtacctcaagtacaaccacgccgacgccgagttccaggagcggctcaaagaagatacgtcttttgggggcaacctcgggcgagcagtcttccaggccaaaaagaggcttcttgaacctcttggtctggttgaggaagcggctaagacggctcctggaaagaagaggcctgtagagcagtctcctcaggaaccggactcctccgcgggtattggcaaatcgggtgcacagcccgctaaaaagagactcaatttcggtcagactggcgacacagagtcagtcccagaccctcaaccaatcggagaacctcccgcagccccctcaggtgtgggatctcttacaatggcttcaggtggtggcgcaccagtggcagacaataacgaaggtgccgatggagtgggtagttcctcgggaaattggcattgcgattcccaatggctgggggacagagtcatcaccaccagcacccgaacctgggccctgcccacctacaacaatcacctctacaagcaaatctccaacagcacatctggaggatcttcaaatgacaacgcctacttcggctacagcaccccctgggggtattttgacttcaacagattccactgccacttctcaccacgtgactggcagcgactcatcaacaacaactggggattccggcctaagcgactcaacttcaagctcttcaacattcaggtcaaagaggttacggacaacaatggagtcaagaccatcgccaataaccttaccagcacggtccaggtcttcacggactcagactatcagctcccgtacgtgctcgggtcggctcacgagggctgcctcccgccgttcccagcggacgttttcatgattcctcagtacgggtatctgacgcttaatgatggaagccaggccgtgggtcgttcgtccttttactgcctggaatatttcccgtcgcaaatgctaagaacgggtaacaacttccagttcagctacgagtttgagaacgtacctttccatagcagctacgctcacagccaaagcctggaccgactaatgaatccactcatcgaccaatacttgtactatctctcaaagactattaacggttctggacagaatcaacaaacgctaaaattcagtgtggccggacccagcaacatggctgtccagggaagaaactacatacctggacccagctaccgacaacaacgtgtctcaaccactgtgactcaaaacaacaacagcgaatttgcttggcctagagcttcttcttgggctctcaatggacgtaatagcttgatgaatcctggacctgctatggccagccacaaagaaggagaggaccgtttctttcctttgtctggatctttaatttttggcaaacaaggaactggaagagacaacgtggatgcggacaaagtcatgataaccaacgaagaagaaattaaaactactaacccggtagcaacggagtcctatggacaagtggccacaaaccaccagagtgcccaagcacaggcgcagaccggctgggttcaaaaccaaggaatacttccgggtatggtttggcaggacagagatgtgtacctgcaaggacccatttgggccaaaattcctcacacggacggcaactttcacccttctccgctgatgggagggtttggaatgaagcacccgcctcctcagatcctcatcaaaaacacacctgtacctgcggatcctccaacggccttcaacaaggacaagctgaactctttcatcacccagtattctactggccaagtcagcgtggagatcgagtgggagctgcagaaggaaaacagcaagcgctggaacccggagatccagtacacttccaactattacaagtctaataatgttgaatttgctgttaatactgaaggtgtatatagtgaaccccgccccattggcaccagatacctgactcgtaatctgtaattgcttgttaatcaataaaccgtttaattcgtttcagttgaactgcggcc

SEQ ID NO: 591 - DNA, 2601 bp, Artificial Sequence
  Description of Artificial Sequence: Synthetic polynucleotide
ccatcgacgtcagacgcggaagcttcgatcaactacgcggacaggtaccaaaacaaatgttctcgtcacgtgggcatgaatctgatgctgtttccctgcagacaatgcgagagactgaatcagaattcaaatatctgcttcactcacggtgtcaaagactgtttagagtgctttcccgtgtcagaatctcaacccgtttctgtcgtcaaaaaggcgtatcagaaactgtgctacattcatcacatcatgggaaaggtgccagacgcttgcactgcttgcgacctggtcaatgtggacttggatgactgtgtttctgaacaataaatgacttaaaccaggtatggctgccgatggttatcttccagattggctcgaggacaaccttagtgaaggaattcgcgagtggtgggctttgaaacctggagcccctcaacccaaggcaaatcaacaacatcaagacaacgctcgaggtcttgtgcttccgggttacaaataccttggacccggcaacggactcgacaagggggagccggtcaacgcagcagacgcggcggccctcgagcacgacaaggcctacgaccagcagctcaaggccggagacaacccgtacctcaagtacaaccacgccgacgccgagttccaggagcggctcaaagaagatacgtcttttgggggcaacctcgggcgagcagtcttccaggccaaaaagaggcttcttgaacctcttggtctggttgaggaagcggctaagacggctcctggaaagaagaggcctgtagagcagtctcctcaggaaccggactcctccgcgggtattggcaaatcgggtgcacagcccgctaaaaagagactcaatttcggtcagactggcgacacagagtcagtcccagaccctcaaccaatcggagaacctcccgcagccccctcaggtgtgggatctcttacaatggcttcaggtggtggcgcaccagtggcagacaataacgaaggtgccgatggagtgggtagttcctcgggaaattggcattgcgattcccaatggctgggggacagagtcatcaccaccagcacccgaacctgggccctgcccacctacaacaatcacctctacaagcaaatctccaacagcacatctggaggatcttcaaatgacaacgcctacttcggctacagcaccccctgggggtattttgacttcaacagattccactgccacttctcaccacgtgactggcagcgactcatcaacaacaactggggattccggcctaagcgactcaacttcaagctcttcaacattcaggtcaaagaggttacggacaacaatggagtcaagaccatcgccaataaccttaccagcacggtccaggtcttcacggactcagactatcagctcccgtacgtgctcgggtcggctcacgagggctgcctcccgccgttcccagcggacgttttcatgattcctcagtacgggtatctgacgcttaatgatggaagccaggccgtgggtcgttcgtccttttactgcctggaatatttcccgtcgcaaatgctaagaacgggtaacaacttccagttcagctacgagtttgagaacgtacctttccatagcagctacgctcacagccaaagcctggaccgactaatgaatccactcatcgaccaatacttgtactatctctcaaagactattaacggttctggacagaatcaacaaacgctaaaattcagtgtggccggacccagcaacatggctgtccagggaagaaactacatacctggacccagctaccgacaacaacgtgtctcaaccactgtgactcaaaacaacaacagcgaatttgcttggcctagagcttcttcttgggctctcaatggacgtaatagcttgatgaatcctggacctgctatggccagccacaaagaaggagaggaccgtttctttcctttgtctggatctttaatttttggcaaacaaggaactggaagagacaacgtggatgcggacaaagtcatgataaccaacgaagaagaaattaaaactactaacccggtagcaacggagtcctatggacaagtggccacaaaccaccagagtgcccaagcacaggcgcagaccggctgggttcaaaaccaaggaatacttccgggtatggtttggcaggacagagatgtgtacctgcaaggacccatttgggccaaaattcctcacacggacggcaactttcacccttctccgctgatgggagggtttggaatgaagcacccgcctcctcagatcctcatcaaaaacacacctgtacctgcggatcctccaacggccttcaacaaggacaagctgaactctttcatcacccagtattctactggccaagtcagcgtggagatcgagtgggagcggcagaaggaaaacagcaagcgctggaacccggagatccagtacacttccaactattacaagtctaataatgttgaatttgctgttaatactgaaggtgtatatagtgaaccccgccccattggcaccagatacctgactcgtaatctgtaattgcttgttaatcaataaaccgtttaattcgtttcagttgaactgcggcc

SEQ ID NO: 592 - DNA, 2601 bp, Artificial Sequence
  Description of Artificial Sequence: Synthetic polynucleotide
ccatcgacgtcagacgcggaagcttcgatcaactacgcggacaggtaccaaaacaaatgttctcgtcacgtgggcatgaatctgatgctgtttccctgcagacaatgcgagagactgaatcagaattcaaatatctgcttcactcacggtgtcaaagactgtttagagtgctttcccgtgtcagaatctcaacccgtttctgtcgtcaaaaaggcgtatcagaaactgtgctacattcatcacatcatgggaaaggtgccagacgcttgcactgcttgcgacctggtcaatgtggacttggatgactgtgtttctgaacaataaatgacttaaaccaggtatggctgccgatggttatcttccagattggctcgaggacaaccttagtgaaggaattcgcgagtggtgggctttgaaacctggagcccctcaacccaaggcaaatcaacaacatcaagacaacgctcgaggtcttgtgcttccgggttacaaataccttggacccggcaacggactcgacaagggggagccggtcaacgcagcagacgcggcggccctcgagcacgacaaggcctacgaccagcagctcaaggccggagacaacccgtacctcaagtacaaccacgccgacgccgagttccaggagcggctcaaagaagatacgtcttttgggggcaacctcgggcgagcagtcttccaggccaaaaagaggcttcttgaacctcttggtctggttgaggaagcggctaagacggctcctggaaagaagaggcctgtagagcagtctcctcaggaaccggactcctccgcgggtattggcaaatcgggtgcacagcccgctaaaaagagactcaatttcggtcagactggcgacacagagtcagtcccagaccctcaaccaatcggagaacctcccgcagccccctcaggtgtgggatctcttacaatggcttcaggtggtggcgcaccagtggcagacaataacgaaggtgccgatggagtgggtagttcctcgggaaattggcattgcgattcccaatggctgggggacagagtcatcaccaccagcacccgaacctgggccctgcccacctacaacaatcacctctacaagcaaatctccaacagcacatctggaggatcttcaaatgacaacgcctacttcggctacagcaccccctgggggtattttgacttcaacagattccactgccacttctcaccacgtgactggcagcgactcatcaacaacaactggggattccggcctaagcgactcaacttcaagctcttcaacattcaggtcaaagaggttacggacaacaatggagtcaagaccatcgccaataaccttaccagcacggtccaggtcttcgcggactcagactatcagctcccgtacgtgctcgggtcggctcacgagggctgcctcccgccgttcccagcggacgttttcatgattcctcagtacgggtatctgacgcttaatgatggaagccaggccgtgggtcgttcgtccttttactgcctggaatatttcccgtcgcaaatgctaagaacgggtaacaacttccagttcagctacgagtttgagaacgtacctttccatagcagctacgctcacagccaaagcctggaccgactaatgaatccactcatcgaccaatacttgtactatctctcaaagactattaacggttctggacagaatcaacaaacgctaaaattcagtgtggccggacccagcaacatggctgtccagggaagaaactacatacctggacccagctaccgacaacaacgtgtctcaaccactgtgactcaaaacaacaacagcgaatttgcttggcctagagcttcttcttgggctctcaatggacgtaatagcttgatgaatcctggacctgctatggccagccacaaagaaggagaggaccgtttctttcctttgtctggatctttaatttttggcaaacaaggaactggaagagacaacgtggatgcggacaaagtcatgataaccaacgaagaagaaattaaaactactaacccggtagcaacggagtcctatggacaagtggccacaaaccaccagagtgcccaagcacaggcgcagaccggctgggttcaaaaccaaggaatacttccgggtatggtttggcaggacagagatgtgtacctgcaaggacccatttgggccaaaattcctcacacggacggcaactttcacccttctccgctgatgggagggtttggaatgaagcacccgcctcctcagatcctcatcaaaaacacacctgtacctgcggatcctccaacggccttcaacaaggacaagctgaactctttcatcacccagtattctactggccaagtcagcgtggagatcgagtgggagctgcagaaggaaaacagcaagcgctggaacccggagatccagtacacttccaactattacaagtctaataatgttgaatttgctgttaatactgaaggtgtatatagtgaaccccgccccattggcaccagatacctgactcgtaatctgtaattgcttgttaatcaataaaccgtttaattcgtttcagttgaactgcggcc

SEQ ID NO: 593 - DNA, 2601 bp, Artificial Sequence
  Description of Artificial Sequence: Synthetic polynucleotide
ccatcgacgtcagacgcggaagcttcgatcaactacgcggacaggtaccaaaacaaatgttctcgtcacgtgggcatgaatctgatgctgtttccctgcagacaatgcgagagactgaatcagaattcaaatatctgcttcactcacggtgtcaaagactgtttagagtgctttcccgtgtcagaatctcaacccgtttctgtcgtcaaaaaggcgtatcagaaactgtgctacattcatcacatcatgggaaaggtgccagacgcttgcactgcttgcgacctggtcaatgtggacttggatgactgtgtttctgaacaataaatgacttaaaccaggtatggctgccgatggttatcttccagattggctcgaggacaaccttagtgaaggaattcgcgagtggtgggctttgaaacctggagcccctcaacccaaggcaaatcaacaacatcaagacaacgctcgaggtcttgtgcttccgggttacaaataccttggacccggcaacggactcgacaagggggagccggtcaacgcagcagacgcggcggccctcgagcacgacaaggcctacgaccagcagctcaaggccggagacaacccgtacctcaagtacaaccacgccgacgccgagttccaggagcggctcaaagaagatacgtcttttgggggcaacctcgggcgagcagtcttccaggccaaaaagaggcttcttgaacctcttggtctggttgaggaagcggctaagacggctcctggaaagaagaggcctgtagagcagtctcctcaggaaccggactcctccgcgggtattggcaaatcgggtgcacagcccgctaaaaagagactcaatttcggtcagactggcgacacagagtcagtcccagaccctcaaccaatcggagaacctcccgcagccccctcaggtgtgggatctcttacaatggcttcaggtggtggcgcaccagtggcagacaataacgaaggtgccgatggagtgggtagttcctcgggaaattggcattgcgattcccaatggctgggggacagagtcatcaccaccagcacccgaacctgggccctgcccacctacaacaatcacctctacaagcaaatctccaacagcacatctggaggatcttcaaatgacaacgcctacttcggctacagcaccccctgggggtattttgacttcaacagattccactgccacttctcaccacgtgactggcagcgactcatcaacaacaactggggattccggcctaagcgactcaacttcaagctcttcaacattcaggtcaaagaggttacggacaacaatggagtcaagaccatcgccaataaccttaccagcacggtccaggtcttcacggactcagactatcagctcccgtacgtgctcgggtcggctcacgagggctgcctcccgccgttcccagcggacgttttcatgattcctcagtacgggtatctgacgcttaatgatggaagccaggccgtgggtcgttcgtccttttactgcctggaatatttcccgtcgcaaatgctaagaacgggtaacaacttccagttcagctacgagtttgagaacgtacctttccatagcagctacgctcacagccaaagcctggaccgactaatgaatccactcatcgaccaatacttgtactatctctcaaagactattaacggttctggacagaatcaacaaacgctaaaattcagtgtggccggacccagcaacatggctgtccagggaagaaactacatacctggacccagctaccgacaacaacgtgtctcaaccactgtgactcaaaacaacaacagcgaaattgcttggcctagagcttcttcttgggctctcaatggacgtaatagcttgatgaatcctggacctgctatggccagccacaaagaaggagaggaccgtttctttcctttgtctggatctttaatttttggcaaacaaggaactggaagagacaacgtggatgcggacaaagtcatgataaccaacgaagaagaaattaaaactactaacccagtagcaacggagtcctatggacaagtggccacaaaccaccagagtgcccaagcacaggcgcagaccggctgggttcaaaaccaaggaatacttccgggtatggtttggcaggacagagatgtgtacctgcaaggacccatttgggccaaaattcctcacacggacggcaactttcacccttctccgctgatgggagggtttggaatgaagcacccgcctcctcagatcctcatcaaaaacacacctgtacctgcggatcctccaacggccttcaacaaggacaagctgaactctttcatcacccagtattctactggccaagtcagcgtggagatcgagtgggagctgcagaaggaaaacagcaagcgctggaacccggagatccagtacacttccaactattgcaagtctaataatgttgaatttgctgttaatactgaaggtgtatatagtgaaccccgccccattggcaccagatacctgactcgtaatctgtaattgcttgttaatcaataaaccgtttaattcgtttcagttgaactgcggcc

SEQ ID NO: 594 - DNA, 2601 bp, Artificial Sequence
  Description of Artificial Sequence: Synthetic polynucleotide
ccatcgacgtcagacgcggaagcttcgatcaactacgcggacaggtaccaaaacaaatgttctcgtcacgtgggcatgaatctgatgctgtttccctgcagacaatgcgagagactgaatcagaattcaaatatctgcttcactcacggtgtcaaagactgtttagagtgctttcccgtgtcagaatctcaacccgtttctgtcgtcaaaaaggcgtatcagaaactgtgctacattcatcacatcatgggaaaggtgccagacgcttgcactgcttgcgacctggtcaatgtggacttggatgtctgtgtttctgaacaataaatgacttaaaccaggtatggctgccgatggttatcttccagattggctcgaggacaaccttagtgaaggaattcgcgagtggtgggctttgaaacctggagcccctcaacccaaggcaaatcaacaacatcaagacaacgctcgaggtcttgtgcttccgggttacaaataccttggacccggcaacggactcgataagggggagccggtcaacgcagcagacgcggcggccctcgagcacgacaaggcctacgaccagcagctcaaggccggagacaacccgtacctcaagtacaaccacgccgacgccgagttccaggagcggctcaaagaagatacgtcttttgggggcaacctcgggcgagcagtcttccaggccaaaaagaggcttcttgaacctcttggtctggttgaggaagcggctaagacggctcctggaaagaagaggcctgtagagcagtctcctcaggaaccggactcctccgcgggtattggcaaatcgggtgcacagcccgctaaaaagagactcaatttcggtcagactggcgacacagagtcagtcccagaccctcaaccaatcggagaacctcccgcagccccctcaggtgtgggatctcttacaatggcttcaggtggtggcgcaccagtggcagacaataacgaaggtgccgatggagtgggtagttcctcgggaaattggcattgcgattcccaatggctgggggacagagtcatcaccaccagcacccgaacctgggccctgcccacctacaacaatcacctctacaagcaaatctccaacagcacatctggaggatcttcaaatgacaacgcctacttcggctacagcaccccctgggggtattttgacttcaacagattccactgccacttctcaccacgtgactggcagcgactcatcaacaacaactggggattccggcctaagcgactcaacttcaagctcttcaacattcaggtcaaagaggttacggacaacaatggagtcaagaccatcgccaataaccttaccagcacggtccaggtcttcacggactcagactatcagctcccgtacgtgctcgggtcggctcacgagggctgcctcccgccgttcccagcggacgttttcatgattcctcagtacgggtatctgacgcttaatgatggaagccaggccgtgggtcgttcgtccttttactgcctggaatatttcccgtcgcaaatgctaagaacgggtaacaacttccagttcagctacgagtttgagaacgtacctttccatagcagctacgctcacagccaaagcctggaccgactaatgaatccactcatcgaccaatacttgtactatctctcaaagactattaacggttctggacagaatcaacaaacgctaaaattcagtgtggccggacccagcaacatggctgtccagggaagaaactacatacctggacccagctaccgacaacaacgtgtctcaaccactgtgactcaaaacaacaacagcgaatttgcttggcctagagcttcttcttgggctctcaatggacgtaatagcttgatgaatcctggacctgctatggccagccacaaagaaggagaggaccgtttctttcctttgtctggatctttaatttttggcaaacaaggaactggaagagacaacgtggatgcggacaaagtcatgataaccaacgaagaagaaattaaaactactaacccggtagcaacggagtcctatggacaagtggccacaaaccaccagagtgcccaagcacaggcgcagaccggctgggttcaaaaccaaggaatacttccgggtatggtttggcaggacagagatgtgtacctgcaaggacccatttgggccaaaattcctcacacggacggcaactttcacccttctccgctgatgggagggtttggaatgaagcacccgcctcctcagatcctcatcaaaaacacacctgtacctgcggatcctccaacggccttcaacaaggacaagctgaactctttcatcacccagtattctactggccaagtcagcgtggagatcgagtgggagctgcagaaggaaaacagcaagcgctggaacccggagatccagtacacttccaactattacaagtctaataatgttgaatttgctgttaatactgaaggtgtatatagtgaaccccgccccattggcaccagatacctgactcgtaatctgtaattgcttgttaatcaataaaccgtttaattcgtttcagttgaactgcggcc

SEQ ID NO: 595 - protein, 736 aa, Artificial Sequence
  Description of Artificial Sequence: Synthetic polypeptide
MTADGYLPDWLEDNLSEGIREWWALKPGAPQPKANQQHQDNARGLVLPGYKYLGPGNGLDKGEPVNAADAAALEHDKAYDQQLKAGDNPYLKYNHADAEFQERLKEDTSFGGNLGRAVFQAKKRLLEPLGLVEEAAKTAPGKKRPVEQSPQEPDSSAGIGKSGAQPAKKRLNFGQTGDTESVPDPQPIGEPPAAPSGVGSLTMASGGGAPVADNNEGADGVGSSSGNWHCDSQWLGDRVITTSTRTWALPTYNNHLYKQISNSTSGGSSNDNAYFGYSTPWGYFDFNRFHCHFSPRDWQRLINNNWGFRPKQLNFKLFNIQVKEVTDNNGVKTIANNLTSTVQVFTDSDYQLPYVLGSAHEGCLPPFPADVFMIPQYGYLTLNDGSQAVGRSSFYCLEYFPSQMLRTGNNFQFSYEFENVPFHSSYAHSQSLDRLMNPLIDQYLYYLSKTINGSGQNQQTLKFSVAGPSNMAVQGRNYIPGPSYRQQRVSTTVTQNNNSEFAWPGASSWALNGRNSLMNPGPAMASHKEGEDRFFPLSGSLIFGKQGTGRDNVDADKVMITNEEEIKTTNPVATESYGQVATNHQSAQAQAQTGWVQNQGILPGMVWQDRDVYLQGPIWAKIPHTDGNFHPSPLMGGFGMKHPPPQILIKNTPVPADPPTAFNKDKLNSFITQYSTGQVSVEIEWELQKENSKRWNPEIQYTSNYYKSNNVEFAVNTEGVYSEPRPIGTRYLTRNL

SEQ ID NO: 596 - protein, 736 aa, Artificial Sequence
  Description of Artificial Sequence: Synthetic polypeptide
MAADGYLPDWLEDNLSEGIREWWALKPGAPQPKANQQHQDNARGLVLPGYKYLGPGNGLDKGEPVNAADAAALEHDKAYDQQLKAGDNPYLKYNHADAEFQERLKEDTSFGGNLGRAVFQAKKRLLEPLGLVEEAAKTAPGKKRPVEQSPQEPDSSAGIGKSGAQPAKKRLNFGQTGDTESVPDPQPIGEPPAAPSGVGSLTMASGGGAPVADNNEGADGVGSSSGNWHCDSQWLGDRVITTSTRTWALPTYNNHLYKQISNSTSGGSSNDNAYFGYSTPWGYFDFNRFHCHFSPRDWQRLINNNWGFRPKRLNFKLFNIQVKEVTDNNGVKTIANNLTSTVQVFTDSDYQLPYVLGSAHEGCLPPFPADVFMIPQYGYLTLNDGSQAVGRSSFYCLEYFPSQMLRTGNNFQFSYEFENVPFHSSYAHSQSLDRLMNPLIDQYLYYLSKTINGSGQNQQTLKFSVAGPSNMAVQGRNYIPGPSYRQQRVSTTVTQNNNSEFAWPGASSWALNGRNSLMNPGPAMASHKEGEDRFFPLSGSLIFGKQGTGRDNVDADKVMITNEEEIKTTNPVATESYGQVATNHQSAQAQAQTGWVQNQGILPGMVWQDRDVYLQGPIWAKIPHTGGNFHPSPLMGGFGMKHPPPQILIKNTPVPADPPTAFNKDKLNSFITQYSTGQVSVEIEWELQKENSKRWNPEIQYTSNYYKSNNVEFAVNTGGVYSEPRPIGTRYLTRNL

SEQ ID NO: 597 - protein, 736 aa, Artificial Sequence
  Description of Artificial Sequence: Synthetic polypeptide
MAADGYLPDWLEDNLSEGIREWWALKPGAPQPKANQQHQDNARGLVLPGYKYLGPGNGLDKGEPVNAADAAALEHDKAYDQQLKAGDNPYLKYNHADAEFQERLKEDTSFGGNLGRAVFQAKKRLLEPLGLVEEAAKTAPGKKRPVEQSPQEPDSSAGIDKSGAQPAKKRLNFGQTGDTESVPDPQPIGEPPAAPSGVGSLTMASGGGAPVADNNEGADGVGSSSGNWHCDSQWLGDRVITTSTRTWALPTYNNHLYKQISNSTSGGSSNDNAYFGYSTPWGYFDFNRFHCHFSPRDWQRLINNNWGFRPKRLNFKLFNIQVKEVTDNNGVKTIANNLTSTVQVFTDSDYQLPYVLGSAHEGCLPPFPADVFMIPQYGYLTLNDGSQAVGRSSFYCLEYFPSQMLRTGNNFQFSYEFENVPFHSSYAHSQSLDRLMNPLIDQYLYYLSKTINGSGQNQQTLKFSVAGPSNMAVQGRNYIPGPSYRQQRVSTTVTQNNNSEFAWPGASSWALNGRNSLMNPGPAMASHKEGEDRFFPLSGSLIFGKQGTGRDNVDADKVMITNEEEIKTTNPVATESYGQVATNHQSAQAQAQTGWVQNQGILPGMVWQDRDVYLQGPIWAKIPHTDGNFHPSPLMGGFGMKHPPPQILIKNTPVPADPPTAFNKDKLNSFITQYSTGQVSVEIEWELQKENSKRWNPEIQYTSNYYKSNNVEFAVNTEGVYSEPRPIGTRYLTRNL

SEQ ID NO: 598 - protein, 736 aa, Artificial Sequence
  Description of Artificial Sequence: Synthetic polypeptide
MAADGYLPDWLEDNLSEGIREWWALKPGAPQPKANQQHQDNARGLVLPGYKYLGPGNGLDKGEPVNAADAAALEHDKAYDQQLKAGDNPYLKYNHADAEFQERLKEDTSFGGNLGRAVLQAKKRLLEPLGLVEEAAKTAPGKKRPVEQSPQEPDSSAGIGKSGAQPAKKRLNFGQTGDTESVPDPQPIGEPPAAPSGVGSLTMASGGGAPVADNNEGADGVGSSSGNWHCDSQWLGDRVITTSTRTWALPTYNNHLYKQISNSTSGGSSNDNAYFGYSTPWGYFDFNRFHCHFSPRDWQRLINNNWGFRPKRLNFKLFNIQVKEVTDNNGVKTIANNLTSTVQVFTDSDYQLPYVLGSAHEGCLPPFPADVFMIPQYGYLTLNDGSQAVGRSSFYCLEYFPSQMLRTGNNFQFSYEFENVPFHSSYAHSQSLDRLMNPLIDQYLYYLSKTINGSGQNQQTLKFSVAGSSNMAVQGRNYIPGPSYRQQRVSTTVTQNNNSEFAWPGASSWALNGRNSLMNPGPAMASHKEGEDRFFPLSGSLIFGKQGTGRDNVDADKVMITNEEEIKTTNPVATESYGQVATNHQSAQAQAQTGWVQNQGILPGMVWQDRDVYLQGPIWAKIPHTDGNFHPSPLMGGFGMKHPPPQILIKNTPVPADPPTAFNKDKLNSFITQYSTGQVSVEIEWELQKENSKRWNPEIQYTSNYYKSNNVEFAVNTEGVYSEPRPIGTRYLTRNL

SEQ ID NO: 599 - protein, 736 aa, Artificial Sequence
  Description of Artificial Sequence: Synthetic polypeptide
MAADGYLPDWLEDNLSEGIREWWALKPGAPQPKANQQHQDNARGLVLPGYKYLGPGNGLDKGEPVNAADAAALEHDRAYDQQLKAGDNPYLKYNHADAEFQERLKEDTSFGGNLGRAVFQAKKRLLEPLGLVEEAAKTAPGKKRPVEQSPQEPDSSAGIGKSGAQPAKKRLNFGQTGDTESVPDPQPIGEPPAAPSGVGSLTMASGGGAPVADNNEGADGVGSSSGNWHCDSQWLGDRVITTSTRTWALPTYNNHLYKQISNSTSGGSSNDNAYFGYSTPWGYFDFNRFHCHFSPRDWQRLINNNWGFRPKRLNFKLFNIQVKEVTDNNGVKTIANNLTSTVQVFTDSDYQLPYVLGSAHEGCLPPFPADVFMIPQYGYLTLNDGSQAVGRSSFYCLEYFPSQMLRTGNNFQFSYEFENVPFHSSYAHSQSLDRLMNPLIDQYLYYLSKTINGSGQNQQTLKFSVAGPSNMAVQGRNYIPGPSYRQQRVSTTVTQNNNSEFAWPGASSWALNGRNSLMNPGPAMASHKEGEDRFFPLSGSLIFGKQGTGRDNVDADKVMITNEEEIKTTNPVATESYGQVATNHQSAQAQAQTGWVQNQGILPGMVWQDRDVYLQGPIWAKIPHTDGNFHPSPLMGGFGMKHPPPQILIKNTPVPADPPTAFNKDKLNSFITQYSTGQVSVEIEWELQKKNSKRWNPEIQYTSNYYKSNNVEFAVNTEGVYSEPRPIGTRYLTRNL

SEQ ID NO: 600 - protein, 736 aa, Artificial Sequence
  Description of Artificial Sequence: Synthetic polypeptide
MAADGYLPDWLEDNLSEGIREWWALKPGAPQPKANQQHQDNARGLVLPGYKYLGPGNGLDKGEPVNAADAAALEHDKAYDQQLKAGDNPYLKYNHADAEFQERLKEDTSFGGNLGRAVFQAKKRLLEPLGLVEEAAKTAPGKKRPVEQSPQEPDSSAGIGKSGAQPAKKRLNFGQTGDTESVPDPQPIGEPPAAPSGVGSLTMASGGGAPVADNNEGADGVGSSSGNWHCDSQWLGDRVITTSTRTWALPTYNNHLYKQISNSTSGGSSNDNAYFGYSTPWGYFDFNRFHCHFSPRDWQRLINNNWGFRPKRLNFKLFNIQVKEVTDNNGVKTIANNLTSTVQVFTDSDYQLPYVLGSAHEGCLPPFPADVFMIPQYGYLTLNDGSQAVGRSSFYCLEYFPSQMLRTGNNFQFSYEFENVPFHSSYAHSQSLDRLMNPLIDQYLYYLSKTINGSGQNQQTLKFSVAGPSNMAVQGRNYIPGPSYRQQRVSTTVTQNNNSEFAWPGASSWALNGRNSLMNPGPAMASHKEGEDRFFPLSGSLIFGKQGTGRDNVDADKVMITNEEEIKTTNPVATESYGQVATNHQSAQARAQTGWVQNQGILPGMVWQDRDVYLQGPIWAKIPHTDGNFHPSPLMGGFGMKHPPPQILIKNTPVPADPPTAFNKDKLNSFITQYSTGQVSVEIEWELQKENSKRWNPEIQYTSNYYKSNNVEFAVNTEGVYSEPRPIGTRYLTRNL

SEQ ID NO: 601 - protein, 736 aa, Artificial Sequence
  Description of Artificial Sequence: Synthetic polypeptide
MAADGYLPDWLEDNLSEGIREWWALKPGAPQPKANQQHQDNARGLVLPGYKYLGPGNGLDKGEPVNAVDAAALEHDKAYDQQLKAGDNPYLKYNHADAEFQERLKEDTSFGGNLGRAVFQAKKRLLEPLGLVEEAAKTAPGKKRPVEQSPQEPDSSAGIGKSGAQPAKKRLNFGQTGDTESVPDPQPIGEPPAAPSGVGSLTMASGGGAPVADNNEGADGVGSSSGNWHCDSQWLGDRVITTSTRTWALPTYNNHLYKQISNSTSGGSSNDNAYFGYSTPWGYFDFNRFHCHFSPRDWQRLINNNWGFRPKRLNFKLFNIQVKEVTDNNGVKTIANNLTSTVQVFTDSDYQLPYVLGSAHEGCLPPFPADVFMIPQYGYLTLNDGSQAVGRSSFYCLEYFPSQMLRTGNNFQFSYEFENVPFHSSYAHSQSLDRLMNPLIDQYLYYLSKTINGSGQNQQTLKFSVAGPSNMAVQGRNYIPGPSYRQQRVSTTVTQNNNSEFAWPGASSWALNGRNSLMNPGPAMASHKEGEDRFFPLSGSLIFGKQGTGRDNVDADKVMITNEEEIKTTNPVATESYGQVATNHQSAQAQAQTGWVQNQGILPGMVWQDRDVYLQGPIWAKIPHTDGNFHPSPLMGGFGMKHPPPQILIKNTPVPADPPTAFNKDKLNSFITQYSTGQVSVEIEWELQKENSKRWNPEIQYTSNYYKSNNVEFAVNTEGVYSEPRPIGTRYLTRNL

SEQ ID NO: 602 - protein, 736 aa, Artificial Sequence
  Description of Artificial Sequence: Synthetic polypeptide
MAADGYLPDWLEDNLSEGIREWWALKPGAPQPKANQQHQDNARGLVLPGYKYLGPGNGLDKGEPVNAADAAALEHDKAYDQQLKAGDNPYLKYNHADAEFQERLKEDTSFGGNLGRAVFQAKKRLLEPLGLVEEAAKTAPGKKRPVEQSPREPDSSAGIGKSGAQPAKKRLNFGQTGDTESVPDPQPIGEPPAAPSGVGSLTMASGGGAPVADNNEGADGVGSSSGNWHCDSQWLGDRVITTSTRTWALPTYNNHLYKQISNSTSGGSSNDNAYFGYSTPWGYFDFNRFHCHFSPRDWQRLINNNWGFRPKRLNFKLFNIQVKEVTDNNGVKTIANNLTSTVQVFTDSDYQLPYVLGSAHEGCLPPFPADVFMIPQYGYLTLNDGSQAVGRSSFYCLEYFPSQMLRTGNNFQFSYEFENVPFHSSYAHSQSLDRLMNPLIDQYLYYLSKTINGSGQNQQTLKFSVAGPSNMAVQGRNYIPGPSYRQQRVSTTVTQNNNSEFAWPGASSWALNGRNSLMNPGPAMASHKEGEDRFFPLSGSLIFGKQGTGRDNVDADKVMITNEEEIKTTNPVATESYGQVATNHQSAQAQAQTGWVQNQGILPGMVWQDRDVYLQGPIWAKIPHTDGNFHPSPLMGGFGMKHPPPQILIKNTPVPADPPTAFNKDKLNSFITQYSTGQVSVEIEWELQKENSKRWNPEIQYTSNYYKSNNVEFAVNTEGVYSEPRPIGTRYLTRNL

SEQ ID NO: 603 - protein, 736 aa, Artificial Sequence
  Description of Artificial Sequence: Synthetic polypeptide
MAADGYLPDWLEDNLSEGIREWWALKPGAPQPKANQQHQDNARGLVLPGYKYLGPGNGLDKGEPVNAADAAALEHDKAYDQQLKAGDNPYLKYNHADAEFQERLKEDTSFGGNLGRAVFQAKKRLLEPLGLVEEAAKTAPGKKRPVEQSPQEPDSSAGIGKSGAQPAKKRLNFGQTGDTESVPDPQPIGEPPAAPSGVGSLTMASCGGAPVADNNEGADGVGSSSGNWHCDSQWLGDRVITTSTRTWALPTYNNHLYKQISNSTSGGSSNDNAYFGYSTPWGYFDFNRFHCHFSPRDWQRLINNNWGFRPKRLNFKLFNIQVKEVTDNNGVKTIANNLTSTVQVFTDSDYQLPYVLGSAHEGCLPPFPADVFMIPQYGYLTLNDGSQAVGRSSFYCLEYFPSQMLRTGNNFQFSYEFENVPFHSSYAHSQSLDRLMNPLIDQYLYYLSKTINGSGQNQQTLKFSVAGPSNMAVQGRNYIPGPSYRQQRVSTTVTQNNNSEFAWPGASSWALNGRNSLMNPGPAMASHKEGEDRFFPLSGSLIFGKQGTGRDNVDADKVMITNEEEIKTTNPVATESYGQVATNHQSAQAQAQTGWVQNQGILPGMVWQDRDVYLQGPIWAKIPHTDGNFHPSPLMGGFGMKHPPPQILIKNTPVPADPPTAFNKDKLNSFITQYSTGQVSVEIEWELQKENSKRWNPEIQYTSNYYKSNNVEFAVNTEGVYSEPRPIGTRYLTRNL

SEQ ID NO: 604 - protein, 736 aa, Artificial Sequence
  Description of Artificial Sequence: Synthetic polypeptide
MAADGYLPDWLEDNLSEGIREWWALKPGAPQPKANQQHQDNARGLVLPGYKYLGPGNGLDKGEPINAADAAALEHDKAYDQQLKAGDNPYLKYNHADAEFQERLKEDTSFGGNLGRAVFQAKKRLLEPLGLVEEAAKTAPGKKRPVEQSPQEPDSSAGIGKSGAQPAKKRLNFGQTGDTESVPDPQPIGEPPAAPSGVGSLTMASGGGAPVADNNEGADGVGSSSGNWHCDSQWLGDRVITTSTRTWALPTYNNHLYKQISNSTSGGSSNDNAYFGYSTPWGYFDFNRFHCHFSPRDWQRLINNNWGFRPKRLNFKLFNIQVKEVTDNNGVKTIANNLTSTVQVFTDSDYQLPYVLGSAHEGCLPPFPADVFMIPQYGYLTLNDGSQAVGRSSFYCLEYFPSQMLRTGNNFQFSYEFENVPFHSSYAHSQSLDRLMNPLIDQYLYYLSKTINGSGQNQQTLKFSVAGPSNMAVQGRNYIPGPSYRQQRVSTTVTQNNNSEFAWPGASSWALNGRNSLMNPGPAMASHKEGEDRFFPLSGSLIFGKQGTGRDNVDADKVMITNEEEIKTTNPVATESYGQVATNHQSAQAQAQTGWVQNQGILPGMVWQDRDVYLQGPIWAKIPHTYGNFHPSPLMGGFGMKHPPPQILIKNTPVPADPPTAFNKDKLNSFITQYSTGQVSVEIEWELQKENSKRWNPEIQYTSNYYKSNNVEFAVNTEGVYSEPRPIGTRYLTRNL

SEQ ID NO: 605 - protein, 736 aa, Artificial Sequence
  Description of Artificial Sequence: Synthetic polypeptide
MAADGYLPDWLEDNLSEGIREWWALKPGAPQPKANQQHQDNARGLVLPGYKYLGPGNGLDKGEPVNAADAAALEHDKAYDQQLKAGDNPYLKYNHADAEFQERLKEDTSFGGNLGRAVFQAKKRLLEPLGLVEEAAKTAPGKKRPVEQSPQEPDSSAGIGKSGAQPAKKRLNFGQTGDTESVPDPQPIGEPPAAPSGVGSLTMASGGGAPVADNNEGADGVGSSSGNWHCDSQWLGDRVITTSTRTWALPTYNNHLYKQISNSTSGGSSNDNAYFGYSTPWGYFDFNRFHCHFSPHDWQRLINNNWGFRPKRLNFKLFNIQVKEVTDNNGVKTIANNLTSTVQVFTDSDYQLPYVLGSAHEGCLPPFPADVFMIPQYGYLTLNDGSQAVGRSSFYCLEYFPSQMLRTGNNFQFSYEFENVPFHSSYAHSQSLDRLMNPLIDQYLYYLSKTINGSGQNQQTLKFNVAGPSNMAVQGRNYIPGPSYRQQRVSTTVTQNNNSEFAWPRASSWALNGRNSLMNPGPAMASHKEGEDRFFPLSGSLIFGKQGTGRDNVDADKVMITNEEEIKTTNPVATESYGQVATNHQSAQAQAQTGWVQNQGILPGMVWQDRDVYLQGPIWAKIPHTDGNFHPSPLMGGFGMKHPPPQILIKNTPVPADPPTAFNKDKLNSFITQYSTGQVSMEIEWELQKENSKRWNPEIQYTSNYYKSNNVEFAVNTEGVYSEPRPIGTRYLTRNL

SEQ ID NO: 606 - protein, 736 aa, Artificial Sequence
  Description of Artificial Sequence: Synthetic polypeptide
MAADGYLPDWLEDNLSEGIREWWALKPGAPQPKANQQHQDNARGLVLPGYKYLGPGNGLDKGEPVNAADAAALEHDKAYDQQLKAGDNPYLKYNHADAEFQERLKEDTSFGGNLGRAVFQAKKRLLEPLGLVEEAAKTAPGKKRPVEQSPQEPDSSAGIGKSGAQPAKKRLNFGQTGDTESVPDPQPIGEPPAAPSGVGSLTMASGGGAPVADNNEGADGVGSSSGNWHCDSQWLGDRVITTSTRTWALPTYNNHLYKQISNSTSGGSSNDNAYFGYSTPWGYFDFNRFHCHFSPRDWQRLINNNWGFRPKRLNFKLFNIQVKEVTDNNGVKTIANNLTSTVQVFTDSDYQLPYVLGSAHEGCLPPFPADVFMIPQYGYLTLNDGSQAVGRSSFYCLEYFPSQMLRTGNNFQFSYEFENVPFHSSYAHSQSLDRLMNPLIDQYLYYLSKTINGSGQNQQTLKFSVAGPSNMAVQGRNYIPGPSYRQQRVSTTVTQNNNSEFAWPRASSWALNGRNSLMNPGPAMASHKEGEDRFFPLSGSLIFGKQGTGRDNVDADKVMITNEEEIKTTNPVATESYGQVATNHQSAQAQAQTGWVQNQGILPGMVWQDRDVYLQGPIWAKIPHTDGNFHPSPLMGGFGMKHPPPQILIKNTPVPADPPTAFNKDKLNSFITQYSTGQVSVEIEWELQKENSKRWNPEIQYTSNYYKSNNVEFAVNTEGVYSEPRPIGTRYLTRNL

SEQ ID NO: 607 - protein, 736 aa, Artificial Sequence
  Description of Artificial Sequence: Synthetic polypeptide
MAADGYLPDWLEDNLSEGIREWWALKPGAPQPKANQQHQDNARGLVLPGYKYLGPGNGLDKGEPVNAADAAALEHDKAYDQQLKAGDNPYLKYNHADAEFQERLKEDTSFGGNLGRAVFQAKKRLLEPLGLVEEAAKTAPGKKRPVEQSPQEPDSSAGIGKSGAQPAKKRLNFGQTGDTESVPDPQPIGEPPAAPSGVGSLTMASGGGAPVADNNEGADGVGSSSGNWHCDSQWLGDRVITTSTRTWALPTYNNHLYKQISNSTSGGSSNDNAYFGYSTPWGYFDFNRFHCHFSPRDWQRLINNNWGFRPKRLNFKLFNIQVKEVTDNNGVKTIANNLTSTVQVFTDSDYQLPYVLGSAHEGCLPPFPADVFMIPQYGYLTLNDGSQAVGRSSFYCLEYFPSQMLRTGNNFQFSYEFENVPFHSSYAHSQSLDRLMNPLIDQYLYYLSKTINGSGQNQQTLKFSVAGPSNMAVQGRNYIPGPSYRQQRVSTTVTQNNNSEFAWPRASSWALNGRNSLMNPGPAMASHKEGEDRFFPLSGSLIFGKQGTGRDNVDADKVMITNEEEIKTTNPVATESYGQVATNHQSAQAQAQTGWVQNQGILPGMVWQDRDVYLQGPIWAKIPHTDGNFHPSPLMGGFGMKHPPPQILIKNTPVPADPPTAFNKDKLNSFITQYSTGQVSVEIEWERQKENSKRWNPEIQYTSNYYKSNNVEFAVNTEGVYSEPRPIGTRYLTRNL

SEQ ID NO: 608 - protein, 736 aa, Artificial Sequence
  Description of Artificial Sequence: Synthetic polypeptide
MAADGYLPDWLEDNLSEGIREWWALKPGAPQPKANQQHQDNARGLVLPGYKYLGPGNGLDKGEPVNAADAAALEHDKAYDQQLKAGDNPYLKYNHADAEFQERLKEDTSFGGNLGRAVFQAKKRLLEPLGLVEEAAKTAPGKKRPVEQSPQEPDSSAGIGKSGAQPAKKRLNFGQTGDTESVPDPQPIGEPPAAPSGVGSLTMASGGGAPVADNNEGADGVGSSSGNWHCDSQWLGDRVITTSTRTWALPTYNNHLYKQISNSTSGGSSNDNAYFGYSTPWGYFDFNRFHCHFSPRDWQRLINNNWGFRPKRLNFKLFNIQVKEVTDNNGVKTIANNLTSTVQVFADSDYQLPYVLGSAHEGCLPPFPADVFMIPQYGYLTLNDGSQAVGRSSFYCLEYFPSQMLRTGNNFQFSYEFENVPFHSSYAHSQSLDRLMNPLIDQYLYYLSKTINGSGQNQQTLKFSVAGPSNMAVQGRNYIPGPSYRQQRVSTTVTQNNNSEFAWPRASSWALNGRNSLMNPGPAMASHKEGEDRFFPLSGSLIFGKQGTGRDNVDADKVMITNEEEIKTTNPVATESYGQVATNHQSAQAQAQTGWVQNQGILPGMVWQDRDVYLQGPIWAKIPHTDGNFHPSPLMGGFGMKHPPPQILIKNTPVPADPPTAFNKDKLNSFITQYSTGQVSVEIEWELQKENSKRWNPEIQYTSNYYKSNNVEFAVNTEGVYSEPRPIGTRYLTRNL

SEQ ID NO: 609 - protein, 736 aa, Artificial Sequence
  Description of Artificial Sequence: Synthetic polypeptide
MAADGYLPDWLEDNLSEGIREWWALKPGAPQPKANQQHQDNARGLVLPGYKYLGPGNGLDKGEPVNAADAAALEHDKAYDQQLKAGDNPYLKYNHADAEFQERLKEDTSFGGNLGRAVFQAKKRLLEPLGLVEEAAKTAPGKKRPVEQSPQEPDSSAGIGKSGAQPAKKRLNFGQTGDTESVPDPQPIGEPPAAPSGVGSLTMASGGGAPVADNNEGADGVGSSSGNWHCDSQWLGDRVITTSTRTWALPTYNNHLYKQISNSTSGGSSNDNAYFGYSTPWGYFDFNRFHCHFSPRDWQRLINNNWGFRPKRLNFKLFNIQVKEVTDNNGVKTIANNLTSTVQVFTDSDYQLPYVLGSAHEGCLPPFPADVFMIPQYGYLTLNDGSQAVGRSSFYCLEYFPSQMLRTGNNFQFSYEFENVPFHSSYAHSQSLDRLMNPLIDQYLYYLSKTINGSGQNQQTLKFSVAGPSNMAVQGRNYIPGPSYRQQRVSTTVTQNNNSEIAWPRASSWALNGRNSLMNPGPAMASHKEGEDRFFPLSGSLIFGKQGTGRDNVDADKVMITNEEEIKTTNPVATESYGQVATNHQSAQAQAQTGWVQNQGILPGMVWQDRDVYLQGPIWAKIPHTDGNFHPSPLMGGFGMKHPPPQILIKNTPVPADPPTAFNKDKLNSFITQYSTGQVSVEIEWELQKENSKRWNPEIQYTSNYCKSNNVEFAVNTEGVYSEPRPIGTRYLTRNL

SEQ ID NO: 610 - protein, 736 aa, Artificial Sequence; identical to SEQ ID NO: 606
  Description of Artificial Sequence: Synthetic polypeptide

SEQ ID NO: 611 - DNA, 2208 bp, Artificial Sequence
  Description of Artificial Sequence: Synthetic polynucleotide
atggctgccgatggttatcttccagattggctcgaggacaaccttagtgaaggaattcgcgagtggtgggctttgaaacctggagcccctcaacccaaggcaaatcaacaacatcaagacaacgctcgaggtcttgtgcttccgggttacaaataccttggacccggcaacggactcgacaagggggagccggtcaacgcagcagacgcggcggccctcgagcacgacaaggcctacgaccagcagctcaaggccggagacaacccgtacctcaagtacaaccacgccgacgccgagttccaggagcggctcaaagaagatacgtcttttgggggcaacctcgggcgagcagtcttccaggccaaaaagaggcttcttgaacctcttggtctggttgaggaagcggctaagacggctcctggaaagaagaggcctgtagagcagtctcctcaggaaccggactcctccgcgggtattggcaaatcgggtgcacagcccgctaaaaagagactcaatttcggtcagactggcgacacagagtcagtcccagaccctcaaccaatcggagaacctcccgcagccccctcaggtgtgggatctcttacaatggcttcaggtggtggcgcaccagtggcagacaataacgaaggtgccgatggagtgggtagttcctcgggaaattggcattgcgattcccaatggctgggggacagagtcatcaccaccagcacccgaacctgggccctgcccacctacaacaatcacctctacaagcaaatctccaacagcacatctggaggatcttcaaatgacaacgcctacttcggctacagcaccccctgggggtattttgacttcaacagattccactgccacttctcaccacgtgactggcagcgactcatcaacaacaactggggattccggcctaagcgactcaacttcaagctcttcaacattcaggtcaaagaggttacggacaacaatggagtcaagaccatcgccaataaccttaccagcacggtccaggtcttcacggactcagactatcagctcccgtacgtgctcgggtcggctcacgagggctgcctcccgccgttcccagcggacgttttcatgattcctcagtacgggtatctgacgcttaatgatggaagccaggccgtgggtcgttcgtccttttactgcctggaatatttcccgtcgcaaatgctaagaacgggtaacaacttccagttcggctacgagtttgagaacgtacctttccatagcagctacgctcacagccaaagcctggaccgactaatgaatccactcatcgaccaatacttgtactatctctcaaagactattaacggttctggacagaatcaacaaacgctaaaattcagtgtggccggacccagcaacatggctgtccagggaagaaactacatacctggacccagctaccgacaacaacgtgtctcaaccactgtgactcaaaacaacaacagcgaatttgcttggcctggagcttcttcttgggctctcaatggacgtaatagcttgatgaatcctggacctgctatggccagccacaaagaaggagaggaccgtttctttcctttgtctggatctttaatttttggcaaacaaggaactggaagagacaacgtggatgcggacaaagtcatgataaccaacgaagaagaaattaaaactactaacccggtagcaacggagtcctatggacaagtggccacaaaccaccagagtgcccaagcacaggcgcagaccggctgggttcaaaaccaaggaatacttccgggtatggtttggcaggacagagatgtgtacctgcaaggacccatttgggccaaaattcctcacacggacggcaactttcacccttctccgctgatgggagggtttggaatgaagcacccgcctcctcagatcctcatcaaaaacacacctgtacctgcggatcctccaacggccttcaacaaggacaagctgaactctttcatcacccagtattctactggccaagtcagcgtggagatcgagtgggagctgcagaaggaaaacagcaagcgctgggacccggagatccagtacacttccaactattacaagtctaataatgttgaatttgctgttaatactgaaggtgtatatagtgaaccccgccccattggcaccagatacctgactcgtaatctg

SEQ ID NO: 612 - DNA, 2208 bp, Artificial Sequence
  Description of Artificial Sequence: Synthetic polynucleotide
atggctgccgatggttatcttccagattggctcgaggacaaccttagtgaaggaattcgcgagtggtgggctttgaaacctggagcccctcaacccaaggcaaatcaacaacatcaagacaacgctcgaggtcttgtgcttccgggttacaaataccttggacccggcaacggactcgacaagggggagccggtcaacgcagcagacgcggcggccctcgagcacgacaaggcctacgaccagcagctcaaggccggagacaacccgtacctcaagtacaaccacgccgacgccgagttccaggagcggctcaaagaagatacgtcttttgggggcaacctcgggcgagcagtcttccaggccaaaaagaggcttcttgaacctcttggtctggttgaggaagcggctaagacggctcctggaaagaagaggcctgtagagcagtctcctcaggaaccggactcctccgcgggtattggcaaatcgggtgcacagcccgctaaaaagagactcaatttcggtcagactggcgacacagagtcagtcccagaccctcaaccaatcggagaacctcccgcagccccctcaggtgtgggatctcttacaatggcttcaggtggtggcgcaccagtggcagacaataacgaaggtgccgatggagtgggtagttcctcgggaaattggcattgcgattcccaatggctgggggacagagtcatcaccaccagcacccgaacctgggccctgcccacctacaacaatcacctctacaagcaaatctccaacagcacatctggaggatcttcaaatgacaacgcctacttcggctacagcaccccctgggggtattttgacttcaacagattccactgccgcttctcaccacgtgactggcagcgactcatcaacaacaactggggattccggcctaagcgactcaacttcaagctcttcaacattcaggtcaaagaggttacggacaacaatggagtcaagaccatcgccaataaccttaccagcacggtccaggtcttcacggactcagactatcagctcccgtacgtgctcgggtcggctcacgagggctgcctcccgccgttcccagcggacgttttcatgattcctcagtacgggtatctgacgcttaatgatggaagccaggccgtgggtcgttcgtccttttactgcctggaatatttcccgtcgcaaatgctaagaacgggtaacaacttccagttcagctacgagtttgagaacgtacctttccatagcagctacgctcacagccaaagcctggaccgactaatgaatccactcatcgaccaatacttgtactatctctcaaagactattaacggttctggacagaatcaacaaacgctaaaattcagtgtggccggacccagcaacatggctgtccagggaagaaactacatacctggacccagctaccgacaacaacgtgtctcaaccactgtgactcaaaacaacaacagcgaatttgcttggcctggagcttcttcttgggctctcaatggacgtaatagcttgatgaatcctggacctgctatggccagccacaaagaaggagaggaccgtttctttcctttgtctggatctttaatttttggcaaacaaggaactggaagagacaacgtggatgcggacaaagtcatgataaccaacgaagaagaaattaaaactactaacccggtagcaacggagtcctatggacaagtggccacaaaccaccagagtgcccaagcacaggcgcagaccggctgggttcaaaaccaaggaatacttccgggtatggtttggcaggacagagatgtgtacctgcaaggacccatttgggccaaaattcctcacacggacggcaactttcacccttctccgctgatgggagggtttggaatgaagcacccgcctcctcagatcctcatcaaaaacgcccctgtacctgcggatcctccaacggccttcaacaaggacaagctgaactctttcatcacccagtattctactggccaagtcagcgtggagatcgagtgggagctgcagaaggaaaacagcaagcgctggaacccggagatccagtacacttccaactattacaagtctaataatgttgaatttgctgttaatactgaaggtgtatatagtgaaccccgccccattggcaccagatacctgactcgtaatctg

SEQ ID NO: 613 - DNA, 2208 bp, Artificial Sequence
  Description of Artificial Sequence: Synthetic polynucleotide
atggctgccgatggttatcttccagattggctcgaggacaaccttagtgaaggaattcgcgagtggtgggctttgaaacctggagcccctcaacccaaggcaaatcaacaacatcaagacaacgctcgaggtcttgtgcttccgggttacaaataccttggacccggcaacggactcgacaagggggagccggtcagcgcagcagacgcggcggccctcgagcacgacaaggcctacgaccagcagctcaaggccggagacaacccgtacctcaagtacaaccacgccgacgccgagttccaggagcggctcaaagaagatacgtcttttgggggcaacctcgggcgagcagtcttccaggccaaaaagaggcttcttgaacctcttggtctggttgaggaagcggctaagacggctcctggaaagaagaggcctgtagagcagtctcctcaggaaccggactcctccgcgggtattggcaaatcgggtgcacagcccgctaaaaagagactcaatttcggtcagactggcgacacagagtcagtcccagaccctcaaccaatcggagaacctcccgcagccccctcaggtgtgggatctcttacaatggcttcaggtggtggcgcaccagtggcagacaataacgaaggtgccgatggagtgggtagttcctcgggaaattggcattgcgattcccaatggctgggggacagagtcatcaccaccagcacccgaacctgggccctgcccacctacaacaatcacctctacaagcaaatctccaacagcacatctggaggatcttcaaatgacaacgcctacttcggctacagcaccccctgggggtattttgacttcaacagattccactgccacttctcaccgcgtgactggcagcgactcatcaacaacaactggggattccggcctaagcgactcaacttcaagctcttcaacattcaggtcaaagaggttacggacaacaatggagtcaagaccatcgccaataaccttaccagcacggtccaggtcttcacggactcagactatcagctcccgtacgtgctcgggtcggctcacgagggctgcctcccgccgttcccagcggacgttttcatgattcctcagtacgggtatctgacgcttaatgatggaagccaggccgtgggtcgttcgtccttttactgcctggaatatttcccgtcgcaaatgctaagaacgggtaacaacttccagttcagctacgagtttgagaacgtacctttccatagcagctacgctcacagccaaagcctggaccgactaatgaatccactcatcgaccaatacttgtactatctctcaaagactattaacggttctggacagaatcaacaaacgctaaaattcagtgtggccggacccagcaacatggctgtccagggaagaaactacatacctggacccagctaccgacaacaacgtgtctcaaccactgtgactcaaaacaacaacagcgaatttgcttggcctggagcttcttcttgggctctcaatggacgtaatagcttgatgaatcctggacctgctatggccagccacaaagaaggagaggaccgtttctttcctttgtctggatctttaatttttggcaaacaaggaactggaagagacaacgtggatgcggacaaagtcatgataaccaacgaagaagaaattaaaactactaacccggtagcaacggagtcctatggacaagtggccacaaaccaccagagtgcccaagcacaggcgcagaccggctgggttcaaaaccaaggaatacttccgggtatggtttggcaggacagagatgtgtacctgcaaggacccatttgggccaaaattcctcacacggacggcaactttcacccttctccgctgatgggagggtttggaatgaagcacccgcctcctcagatcctcatcaaaaacacacctgtacctgcggatcctccaacggccttcaacaaggacaagctgaactctttcatcacccagtattctactggccaagtcagcgtggagatcgagtgggagctgcagaaggaaaacagcaagcgctggaacccggagatccagtacacttccaactattacaagtctaataatgttgaatttgctgttaatactgaaggtgtatatagtgaaccccgccccattggcaccagatacctgactcgtaatctg

SEQ ID NO: 614 - DNA, 2208 bp, Artificial Sequence
  Description of Artificial Sequence: Synthetic polynucleotide
atggctgccgatggttatcttccagattggctcgaggacaaccttagtgaaggaattcgcgagtggtgggctttgaaacctggagcccctcaacccaaggcaaatcaacaacatcaagacaacgctcgaggtcttgtgcttccgggttacaaataccttggacccggcaacggactcgacaagggggagccggtcaacgcagcagacgcggcggccctcgagcacgacaaggcctacgaccagcagctcaaggccggagacaacccgtacctcaagtacaaccacgccgacgccgagttccaggagcggctcaaagaagatacgtcttttgggggcaacctcgggcgagcagtcttccaggccaaaaagaggcttcttgaacctcttggtctggttgaggaagcggctaagacggctcctggaaagaagaggcctgtagagcagtctcctcaggaaccggactcctccgcgggtattggcaaatcgggtgcacagcccgctaaaaagagactcaatttcggtcagactggcgacacagagtcagtcccagaccctcaaccaatcggagaacctcccgcagccccctcaggtgtgggatctcttacaatggcttcaggtggtggcgcaccagtggcagacaataacgaaggtgccgatggagtgggtagttcctcgggaaattggcattgcgattcccaatggctgggggacagagtcatcaccaccagcacccgaacctgggccctgcccacctacaacaatcacctctacaagcaaatctccaacagcacatctggaggatcttcaaatgacaacgcctacttcggctacagcaccccctgggggtattttgacttcaacagattccactgccacttctcaccacgtgactggcagcgactcatcaacaacaactggggattccggcctaagcgactcaacttcaagctcttcaacattcaggtcaaagaggttacggacaacaatggagtcaagaccatcgccaataaccttaccagcacggtccaggtcttcacggactcagactatcagctcccgtacgtgctcgggtcggctcacgagggctgcctcccgccgttcccagcggacgttttcatgattcctcagtacgggtatctgacgcttaatgatggaagccaggccgtgggtcgttcgtccttttactgcctggaatatttcccgtcgcaaatgctaagaacgggtaacaacttccagttcagctacgagtttgagaacgtacctttccatagcagctacgctcacagccaaagcctggaccgactaatgaatccactcatcgaccaatacttgtactatctctcaaagactattaacggttctggacagaatcaacaaacgctaaaattcagtgtggccggacccagcaacacggctgtccagggaagaaactacatacctggacccagctaccgacaacaacgtgtctcaaccactgtgactcaaaacaacaacagcgaatttgcttggcctggagcttcttcttgggctctcaatggacgtaatagcttgatgaatcctggacctgctatggccagccacaaagaaggagaggaccgtttctttcctttgtctggatctttaatttttggcaaacaaggaactggaagagacaacgtggatgcggacaaagtcatgataaccaacgaagaagaaattaaaactactaacccggtagcaacggagtcctatggacaagtggccacaaaccaccagagtgcccaagcacaggcgcagaccggctgggttcaaaaccaaggaatacttccgggtatggtttggcaggacagagatgtgtacctgcaaggacccatttgggccaaaattcctcacacggacggcaactttcacccttctccgctgatgggagggtttggaatgaagcacccgcctcctcagatcctcatcaaaaacacacctgtacctgcggatcctccaacggccttcaacaaggacaagctgaactctttcatcacccagtattctactggccaagtcagcgtggagatcgagtgggagctgcagaaggaaaacagcaagcgctggaacccggagatccagtacacttccaactattacaagtctaataatgttgaatttgctgttaatactgaaggtgtatatagtgaaccccgccccattggcaccagatacctgactcgtaatctg

SEQ ID NO: 615 - DNA, 2208 bp, Artificial Sequence
  Description of Artificial Sequence: Synthetic polynucleotide
atggctgccgatggttatcttccagattggctcgaggacaaccttagtgaaggaattcgcgagtggtgggctttgaaacctggagcccctcaacccaaggcaaatcaacaacatcaagacaacgctcgaggtcttgtgcttccgggttacaaataccttggacccggcaacggactcgacaagggggagccggtcaacgcagcagacgcggcggccctcgagcacgacaaggcctacgaccagcagctcaaggccggagacaacccgtacctcaagtacaaccacgccgacgccgagttccaggagcggctcaaagaagatacgtcttttgggggcaacctcgggcgagcagtcttccaggccaaaaagaggcttcttgaacctcttggtctggttgaggaagcggctaagacggctcctggaaagaagaggcctgtagagcagtctcctcaggaaccggactcctccgcgggtattggcaaatcgggtgcacagcccgctaaaaagagactcaatttcggtcagactggcgacacagagtcagtcccagaccctcaaccaatcggagaacctcccgcagccccctcaggtgtgggatctcttacaatggcttcaggtggtggcgcaccagtggcagacaataacgaaggtgccgatggagtgggtagttcctcgggaaattggcattgcgattcccaatggctgggggacagagtcatcaccaccagcacccgaacctgggccctgcccacctacaacaatcacctctacaagcaaatctccaacagcacatctggaggatcttcaaatgacaacgcctacttcggctacagcaccccctgggggtattttgacttcaacagattccactgccacttctcaccacgtgactggcagcgactcatcaacaacaactggggattccggcctaagcggctcaacttcaagctcttcaacattcaggtcaaagaggttacggacaacaatggagtcaagaccatcgccaataaccttaccagcacggtccaggtcttcacggactcagactatcagctcccgtacgtgctcgggtcggctcacgagggctgcctcccgccgttcccagcggacgttttcatgattcctcagtacgggtatctgacgcttaatgatggaagccaggccgtgggtcgttcgtccttttactgcctggaatatttcccgtcgcaaatgctaagaacgggtagcaacttccagttcagctacgagtttgagaacgtacctttccatagcagctacgctcacagccaaagcctggaccgactaatgaatccactcatcgaccaatacttgtactatctctcaaagactattaacggttctggacagaatcaacaaacgctaaaattcagtgtggccggacccagcaacatggctgtccagggaagaaactacatacctggacccagctaccgacaacaacgtgtctcaaccactgtgactcaaaacaacaacagcgaatttgcttggcctggagcttcttcttgggctctcaatggacgtaatagcttgatgaatcctggacctgctatggccagccacaaagaaggagaggaccgtttctttcctttgtctggatctttaatttttggcaaacaaggaactggaagagacaacgtggatgcggacaaagtcatgataaccaacgaagaagaaattaaaactactaacccggcagcaacggagtcctatggacaagtggccacaaaccaccagagtgcccaagcacaggcgcagaccggctgggttcaaaaccaaggaatacttccgggtatggtttggcaggacagagatgtgtacctgcaaggacccatttgggccaaaattcctcacacggacggcaactttcacccttctccgctgatgggagggtttggaatgaagcacccgcctcctcagatcctcatcaaaaacacacctgtacctgcggatcctccaacggccttcaacaaggacaagctgaactctttcatcacccagtattctactggccaagtcagcgtggagatcgagtgggagctgcagaaggaaaacagcaagcgctggaacccggagatccagcacacttccaactattacaagtctaataatgttgaatttgctgttaatactgaaggtgtatatagtgaaccccgccccattggcaccagatacctgactcgtaatctg

SEQ ID NO: 616 - DNA, 2208 bp, Artificial Sequence
  Description of Artificial Sequence: Synthetic polynucleotide
atggctgccgatggttatcttccagattggctcgaggacaaccttagtgaaggaattcgcgagtggtgggctttgaaacctggagcccctcaacccaaggcaaatcaacaacatcaagacaacgctcgaggtcttgtgcttccgggttacaaataccttggacccggcaacggactcgacaagggggagccggtcaacgcagcagacgcggcggccctcgagcacgacaaggcctacgaccagcagctcaaggccggagacaacccgtacctcaagtacaaccacgccgacgccgagttccaggagcggctcaaagaagatacgtcttttgggggcaacctcgggcgagcagtcttccaggccaaaaagaggcttcttgaacctcttggtctggttgaggaagcggctaagacggctcctggaaagaagaggcctgtagagcagtctcctcaggaaccggactcctccgcgggtattggcaaatcgggtgcacagcccgctaaaaagagactcaatttcggtcagactggcgacacagagtcagtcccagaccctcaaccaatcggagaacctcccgcagccccctcaggtgtgggatctcttacaatggcttcaggtggtggcgcaccagtggcagacaataacgaaggtgccgatggagtgggtagttcctcgggaaattggcattgcgattcccaatggctgggggacagagtcatcaccaccagcacccgaacctgggccctgcccacctacaacaatcacctctacaagcaaatctccaacagcacatctggaggatcttcaaatgacaacgcctacttcggctacagcaccccctgggggtattttgacttcaacagattccactgccacttctcaccacgtgactggcagcgactcatcaacaacaactggggattccggcctaagcgactcaacttcaggctcttcaacattcaggtcaaagaggttacggacaacaatggagtcaagaccatcgccaataaccttaccagcacggtccaggtcttcacggactcagactatcagctcccgtacgtgctcgggtcggctcacgagggctgcctcccgccgttcccagcggacgttttcatgattcctcagtacgggtatctgacgcttaatgatggaagccaggccgtgggtcgttcgtccttttactgcctggaatatttcccgtcgcaaatgctaagaacgggtaacaacttccagttcagctacgagtttgagaacgtacctttccatagcagctacgctcacagccaaagcctggaccgactaatgaatccactcatcgaccaatacttgtactatctctcaaagactattaacggttctggacagaatcaacaaacgctaaaattcagtgtggccggacccagcaacatggctgtccagggaagaaactacatacctggacccagctaccgacaacaacgtgtctcaaccactgtgactcaaaacaacaacagcgaatttgcttggcctggagcttcttcttgggctctcaatggacgtaatagcttgatgaatcctggacctgctatggccagccacaaagaaggagaggaccgtttctttcctttgtctggatctttaatttttggcaaacaaggaactggaagagacaacgtggatgcggacaaagtcatgataaccaacgaagaagaaattaaaactactaacccggtagcaacggagtcctatggacaagtggccacaaaccaccagagtgcccaagcacaggcgcagaccggctgggttcaaagccaaggaatacttccgggtatggtttggcaggacagagatgtgtacctgcaaggacccatttgggccaaaattcctcacacggacggcaactttcacccttctccgctgatgggagggtttggaatgaagcacccgcctccccagatcctcatcaaaaacacacctgtacctgcggatcctccaacggccttcaacaaggacaagctgaactctttcatcacccagtattctactggccaagtcagcgtggagatcgagtgggagctgcagaaggaaaacagcaagcgctggaacccggagatccagtacacttccaactattacaagtctaataatgttgaatttgctgttaatactgaaggtgtatatagtgaaccccgccccattggcaccagatacctgactcgtaatctg

SEQ ID NO: 617 - DNA, 2205 bp, Artificial Sequence
  Description of Artificial Sequence: Synthetic polynucleotide
atggctgccgatggttatcttccagattggctcgaggacaaccttagtgaaggaattcgcgagtggtgggctttgaaacctggagcccctcaacccaaggcaaatcaacaacatcaagacaacgcccgaggtcttgtgcttccgggttacaaataccttggacccggcaacggactcgacaagggggagccggtcaacgcagcagacgcggcggccctcgagcacgacaaggcctacgaccagcagctcaaggccggagacaacccgtacctcaagtacaaccacgccgacgccgagttccaggagcggctcaaagaagatacgtcttttgggggcaacctcgggcgagcagtcttccaggccaaaaagaggcttcttgaacctcttggtctggttgaggaagcggctaagacggctcctggaaagaagaggcctgtagagcagtctcctcaggaaccggactcctccgcgggtattggcaaatcgggtgcacagcccgctaaaaagagactcaatttcggtcagactggcgacacagagtcagtcccagaccctcaaccaatcggagaacctcccgcagccccctcaggtgtgggatctcttacaatggcttcaggtggtggcgcaccagtggcagacaataacgaaggtgccgatggagtgggtagttcctcgggaaattggcattgcgattcccaatggctgggggacagagtcatcaccaccagcacccgaacctgggccctgcccacctacaacaatcacctctacaagcaaatctccaacagcacatctggaggatcttcaaatgacaacgcctacttcggctacagcaccccctggaggtattttgacttcaacagattccactgccacttctcaccacgtgactggcagcgactcatcaacaactggggattccggcctaagcgactcaacttcaagctcttcaacattcaggtcaaagaggttacggacaacaatggagtcaagaccatcgccaataaccttaccagcacggtccaggccttcacggactcagactatcagctcccgtacgtgctcgggtcggctcacgagggctgcctcccgccgttcccagcggacgttttcatgattcctcagtacgggtatctgacgcttaatgatggaagccaggccgtgggtcgttcgtccttttactgcctggaatatttcccgtcgcaaatgctaagaacgggtaacaacttccagttcagctacgagtttgagaacgtacctttccatagcagctacgctcacagccaaagcctggaccgactaatgaatccactcatcgaccaatacttgtactatctctcaaagactattaacggttctggacagaatcaacaaacgctaaaattcagtgtggccggacccagcaacatggctgtccagggaagaaactacatacctggacccagctaccgacaacaacgtgtctcaaccactgtgactcaaaacaacaacagcgaatttgcttggcctggagcttcttcttgggctctcaatggacgtaatagcttgatgaatcctggacctgctatggccagccacaaagaaggagaggaccgtttctttcctttgtctggatctttaatttttggcaaacaaggaactggaagagacaacgtggatgcggacaaagtcatgataaccaacgaagaagaaattaaaactactaacccggtagcaacggagtcctatggacaagtggccacaaaccaccagagtgcccaagcacaggcgcagaccggctgggttcaaaaccaaggaatacttccgggtatggtttggcaggacagagatgtgtacctgcaaggacccatttgggccaaaattcctcacacggacggcaactttcacccttctccgctgatgggagggtttggaatgaagcacccgcctcctcagatcctcatcaaaaacacacctgtacctgcggatcctccaacggccttcaacaaggacgagctgaactctttcatcacccagtattctactggccaagtcagcgtggagatcgagtgggagctgcagaaggaaaacagcaagcgctggaacccggagatccagtacacttccaactattacaagtctaataatgttgaatttgctgttaatactgaaggtgtatatagtgaaccccgccccattggcaccagatacctgactcgtaatctg

SEQ ID NO: 618 - DNA, 2205 bp, Artificial Sequence
  Description of Artificial Sequence: Synthetic polynucleotide
atggctgccgatggttatcttccagattggctcgaggacaaccttagtgaaggaattcgcgagtggtgggctttgaaacctggagcccctcaacccaaggcaaatcaacaacatcaagacaacgctcgaggtcttgtgcttccgggttacaaataccttggacccggcaacggactcgacaagggggagccggtcaacgcagcagacgcggcggccctcgagcacgacaaggcctacgaccagcagctcaaggccggagacaacccgtacctcaagtacaaccacgccgacgccgagttccaggagcggctcaaagaagatacgtcttttgggggcaacctcgggcgagcagtcttccaggacaaaaagaggcttcttgaacctcttggtctggttgaggaagcggctaagacggctcctggaaagaagaggcctgtagagcagtctcctcaggaaccggactcctccgcgggtattggcaaatcgggtgcacagcccgctaaaaagagactcaatttcggtcagactggcgacacagagtcagtcccagaccctcaaccaatcggagaacctcccgcagccccctcaggtgtgggatctcttacaatggcttcaggtggtggcgcaccagtggcagacaataacgaaggtgccgatggagtgggtagttcctcgggaaattggcattgcgattcccaatggctgggggacagagtcatcaccaccagcacccgaacctgggccctgcccacctacaacaatcacctctacaagcaaatctccaacagcacatctggaggatcttcaaatgacaacgcctacttcggctacagcaccccctgggggtattttgacttcaacagattccactgccacttctcaccacgtgactggcagcgactcatcaacaactggggattccggcctaagcgactcaacttcaagctcttcaacattcaggtcaaagaggttacggacaacaatggagtcaagaccatcgccaataaccttaccagcacggtccaggtcttcacggactcagactatcagctcccgtacgtgctcgggtcggctcacgagggctgcctcccgccgttcccagcggacgttttcatgattcctcagtacgggtatctgacgcttaatgatggaagccaggccgtgggtcgttcgtccttttactgcctggaatatttcccgtcgcaaatgctaagaacgggtaacaacttccaattcagctacgagtttgagaacgtacctttccatagcagctacgctcacagccaaagcctggaccgactaatgaatccactcatcgaccaatacttgtactatctctcaaagactattaacggttctggacagaatcaacaaacgctaaaattcagtgtggccggacccagcaacatggctgtccagggaagaaactacatacctggacccagctaccgacaacaacgtgtctcaaccactgtgactcaaaacaacaacagcgaatttgcttggcctggagcttcttcttgggctctcaatggacgtaatagcttgatgaatcctggacctgctatggccagccacaaagaaggagaggaccgtttctttcctttgtctggatctttaatttttggcaaacaaggaactggaagagacaacgtggatgcggacaaagtcatgataaccaacgaagaagaaattaaaactactaacccggtagcaacggagtcctatggacaagtggccacaaaccaccagagtgcccaagcacaggcgcagaccggctgggttcaaaaccaaggaatacttccgggtatggtttggcaggacagagatgtgtacctgcaaggacccatttgggccaaaattcctcacacggacggcaactttcacccttctccgctgatgggagggtttggaatgaagcacccgcctcctcagatcctcatcaaaaacacacctgtacctgcggatcctccaacggccttcaacaaggacaagctgaactctttcatcacccagtattctactggccaagtcagcgtggagatcgagtgggagctgcagaaggaaaacagcaagcgctggaacccggagatccagtacacttccaactattacaagtctaataatgttgaatttgctgttaatactgaaggtgtatatagtgaaccccgccccattggcaccagatacctgactcgtaatctg

SEQ ID NO: 619 - DNA, 2208 bp, Artificial Sequence
  Description of Artificial Sequence: Synthetic polynucleotide
atggctgccgatggttatcttccagattggctcgaggacaaccttagtgaaggaattcgcgagtggtgggctttgaaacctggagcccctcaacccaaggcaaatcaacaacatcaagacaacgctcgaggtcttgtgcttccgggttacaaataccttggacccggcaacggactcgacaagggggagccggtcaacgcagcagacgcggcggccctcgagcacgacaaggcctacgaccagcagctcaaggccggagacaacccgtacctcaagtacaaccacgccgacgccgagttccaggagcggctcaaagaagatacgtcttttgggggcaacctcgggcgagcagtcttccaggccaaaaagaggcttcttgaacctcttggtctggttgaggaagcggctaagacggctcctggaaagaagaggcctgtagagcagtctcctcaggaaccggactcctccgcgggtattggcaaatcgggtgcacagcccgctaaaaagagactcaatttcggtcagactggcgacacagagtcagtcccagaccctcaaccaatcggagaacctcccgcagccccctcaggtgtgggatctcttacaatggcttcaggtggtggcgcaccagtggcagacaataacgaaggtgccgatggagtgggtagttcctcgggaaattggcattgcgattcccaatggctgggggacagagccatcaccaccagcacccgaacctgggccctgcccacctacaacaatcacctctacaagcaaatctccaacagcacatctggaggatcttcaaatgacaacgcctacttcggctacagcaccccctgggggtattttgacttcaacagattccactgccacttctcaccacgtgactggcagcggctcatcaacaacaactggggattccggcctaagcgactcaacttcaagctcttcaacattcaggtcaaagaggttacggacaacaatggagtcaagaccatcgccaataaccttaccagcacggtccaggtcttcacggactcagactatcagctcccgtacgtgctcgggtcggctcacgagggctgcctcccgccgttcccagcggacgttttcatgattcctcagtacgggtatctgacgcttaatgatggaagccaggccgtgggtcgttcgtccttttactgcctggaatatttcccgtcgcaaatgctaagaacgggtaacaacttccagttcagctacgagtttgagaacgtacctttccatagcagctacgctcacagccaaagcctggaccgactaatgaatccactcatcgaccaatacttgtactatctctcaaagactattaacggttctggacagaatcaacaaacgctaaaattcagtgtggccggacccagcaacatggctgtccagggaagaaactacatacctggacccagctaccgacaacaacgtgtctcaaccactgtgactcaaaacaacaacagcgaatttgcttggcctggagcttcttcttgggctctcaatggacgtaatagcttgatgaatcctggacctgctatggccagccacaaagaaggagaggaccgtttctttcctttgtctggatctttaatttttggcaaacaaggaactggaagagacaacgtggatgcggacaaagtcatgacaaccaacgaagaagaaattaaaactactaacccggtagcaacggagtcctatggacaagtggccacaaaccaccagagtgcccaagcacaggcgcagaccggctgggttcaaaaccaaggaatacttccgggtatggtttggcaggacagagatgtgtacctgcaaggacccatttgggccaaaattcctcacacggacggcaactttcacccttctccgctgatgggagggtttggaatgaagcacccgcctcctcagatcctcatcaaaaacacacctgtacctgcggatcctccaacggccttcaacaaggacaagctgaactctttcatcacccagtattctactggccaagtcagcgtggagatcgagtgggagctgcagaaggaaaacagcaagcgctggaacccggagatccagtacacttccaactattacaagtctaataatgttgaatttgctgttaatactgaaggtgtatatagtgaaccccgccccattggcaccagatacctgactcgtaatctg

SEQ ID NO: 620 - DNA, 2208 bp, Artificial Sequence
  Description of Artificial Sequence: Synthetic polynucleotide
atggctgccgatggttatcttccagattggctcgaggacaaccttagtgaaggaattcgcgagtggtgggctttgaaacctggagcccctcaacccaaggcaaatcaacaacatcaagacaacgctcgaggtcttgtgcttccgggttacaaataccttggacccggcaacggactcgacaagggggagccggtcaatgcagcagacgcggcggccctcgagcacgacaaggcctacgaccagcagctcaaggccggagacaacccgtacctcaagtacaaccacgccgacgccgagttccaggagcggctcaaagaagatacgtcttttgggggcaacctcgggcgagcagtcttccagaccaaaaagaggcttcttgaacctcttggtctggttgaggaagcggctaagacggctcctggaaagaagaggcctgtagagcagtctcctcaggaaccgggctcctccgcgggtattggcaaatcgggtgcacagcccgctaaaaagagactcaatttcggtcagactggcgacacagagtcagtcccagaccctcaaccaatcggagaacctcccgcagccccctcaggtgtgggatctcttacaatggcttcaggtggtggcgcaccagtggcagacaataacgaaggtgccgatggagtgggtagttcctcgggaaattggcattgcgattcccaatggctgggggacagagtcatcaccaccagcacccgaacctgggccctgcccacctacaacaatcacctctacaagcaaatctccaacagcacatctggaggatcttcaaatgacaacgcctacttcggctacagcaccccctgggggtattttgacttcaacagattccactgccacttctcaccacgtgactggcagcgactcatcaacaacaactggggattccggcctaagcgactcaacttcaagctcttcaacattcaggtcaaagaggttacggacaacaatggagtcaagaccatcgccaataaccttaccagcacggtccaggtcttcacggactcagactatcagctcccgtacgtgctcgggtcggctcacgagggctgcctcccgccgttcccagcggacgttttcatgattcctcagtacgggtatctgacgcttaatgatggaagccaggccgtgggtcgttcgtccttttactgcctggaatatttcccgtcgcaaatgctaagaacgggtaacaacttccagttcagctacgagtttgagaacgtacctttccatagcagctacgctcacagccaaagcctggaccgactaatgaatccactcatcgaccaatacttgcactatctctcaaagactattaacggttctggacagaatcaacaaacgctaaaattcagtgtggccggacccagcaacatggctgtccagggaagaaactacatacctggacccagctaccgacaacaacgtgtctcaaccactgtgactcaaaacaacaacagcgaatttgcttggcctggagcttcttcttgggctctcaatggacgtaatagcttgatgaatcctggacctgctatggccagccacaaagaaggagaggaccgtttctttcctttgtctggatctttaatttttggcaaacaaggaactggaagagacaacgtggatgcggacaaagtcatgataaccaacgaagaagaaattaaaactactaacccggtagcaacggagtcctatggacaagtggccacaaaccaccagagtgcccaagcacaggcgcagaccggctgggttcaaaaccaaggaatacttccgggtatggtttggcaggacagagatgtgtacctgcaaggacccatttgggccaaaattcctcacacggacggcaactttcacccttctccgctgatgggagggtttggaatgaagcacccgcctcctcagatcctcatcaaaaacacacctgtacctgcggatcctccaacggccttcaacaaggacaagctgaactctttcatcacccagtattctactggccaagtcagcgtggagatcgagtgggagctgcagaaggaaaacagcaagcgctggaacccggagatccagtacacttccaactattacaagtctaataatgttgaatttgctgttaatactgaaggtgtatatagtgaaccccgccccattggcaccagatacctgactcgtaatctg

SEQ ID NO: 621 - DNA, 2208 bp, Artificial Sequence
  Description of Artificial Sequence: Synthetic polynucleotide
atggctgccgatggttattttccagattggctcgaggacaaccttagtgaaggaattcgcgagtggtgggctttgaaacctggagcccctcaacccaaggcaaatcaacaacatcaagacaacgctcgaggtcttgtgcttccgggttacaaataccttggacccggcaacggactcgacaagggggagccggtcaacgcagcagacgcggcggccctcgagcacgacaaggcctacgaccagcagctcaaggccggagacaacccgtacctcaagtacaaccacgccgacgccgagttccaggagcggctcaaagaagatacgtcttttgggggcaacctcgggcgagcagtcttccaggccaaaaagaggcttcttgaacctcttggtctggttgaggaagcggctaagacggctcctggaaagaagaggcctgtagagcagtctcctcaggaaccggactcctccgcgggtattggcaaatcgggtgcacagcccgctaaaaagagactcaatttcggtcagactggcgacacagagtcagtcccagaccctcaaccaatcggagaatctcccgcagccccctcaggtgtgggatctcttacaatggcttcaggtggtggcgcaccagtggcagacaataacgaaggtgccgatggagtgggtagttcctcgggaaattggcattgcgattcccaatggctgggggacagagtcatcaccaccagcacccgaacctgggccctgcccacctacaacaatcacctctacaagcaaatctccaacagcacatctggaggatcttcaaatgacaacgcctacttcggctacagcaccccctgggggtattttgacttcaacagattccactgccacttctcaccacgtgactggcagcgactcatcaacaacaactggggattccggcctaagcgactcaacttcaagctcttcaacattcaggtcaaagaggttacggacaacaatggagtcaagaccatcgccaataaccttaccagcacggtccaggtcttcacggactcagactatcagctcccgtacgtgctcgggtcggctcacgagggctgcctcccgccgttcccagcggacgttttcatgattcctcagtacgggtatctgacgcttaatgatggaagccaggccgtgggtcgttcgtccttttactgcctggaatatctcccgtcgcaaatgctaagaacgggtaacaacttccagttcagctacgagtttgagaacgtacctttccatagcagctacgctcacagccaaagcctggaccgactaatgaatccactcatcgaccaatacttgcactatctctcaaagactattaacggttctggacagaatcaacaaacgctaaaattcagtgtggccggacccagcaacatggctgtccagggaagaaactacatacctggacccagctaccgacaacaacgtgtctcaaccactgtgactcaaaacaacaacagcgaatttgcttggcctggagcttcttcttgggctctcaatggacgtaatagcttgatgaatcctggacctgctgtggccagccacaaagaaggagaggaccgtttctttcctttgtctggatctttaatttttggcaaacaaggaactggaagagacaacgtggatgcggacaaagtcatgataaccaacgaagaagaaattaaaactactaacccggtagcaacggagtcctatggacaagtggccacaaaccaccagagtgcccaagcacaggcgcagaccggctgggttcaaaaccaaggaatacttccgggtatggtttggcaggacagagatgtgtacctgcaaggacccatttgggccaaaattcctcacacggacggcaactttcacccttctccgctgatgggagggtttggaatgaagcacccgcctcctcagatcctcatcaaaaacacacctgtacctgcggatcctccaacggccttcaacaaggacaagctgaactctttcatcacccagtattctactggccaagtcagcgtggagatcgagtgggagctgcagaaggaaaacagcaagcgctggaacccggagatccagtacacttccaactattacaagtctaataatgttgaatttgctgttaatactgaaggtgtatatagtgaaccccgccccattggcaccagatacctgactcgtaatctg

SEQ ID NO: 622 - DNA, 2208 bp, Artificial Sequence
  Description of Artificial Sequence: Synthetic polynucleotide
atggctgccgatggttatcttccagattggctcgaggacaaccttagtgaaggaattcgcgagtggtgggctttgaaacctggagcccctcaacccaaggcaaatcaacaacatcaagacaacgctcgaggtcttgtgcttccgggttacaaataccttggacccggcaacggactcgacaagggggagccggtcaacgcagcagacgcggcggccctcgagcacgacaaggcctacgaccagcagctcaaggccggagacaacccgtacctcaagtacaaccacgccgacgccgagttccaggagcggctcaaagaagatacgtcttttgggggcaacctcgggcgagcagtcttccaggccaaaaagaggcttcttgaacctcttggtccggttgaggaagcggctaagacggctcctggaaagaagaggcctgtagagcagtctcctcaggaaccggactcctccgcgggtattggcaaatcgggtgcacagcccgctaaaaagagactcaatttcggtcagactggcgacacagagtcagtcccagaccctcaaccaatcggagaacctcccgcagccccctcaggtgtgggatctcttacaatggcttcaggtggtggcgcaccagtggcagacaataacgaaggtgccgatggagtgggtagttcctcgggaaattggcattgcgattcccaatggctgggggacagagtcatcaccaccagcacccgaacctgggccctgcccacctacaacaatcacctctacaagcaaatctccaacagcacatctggaggatcttcaaatgacaacgcctacttcggctacagcaccccctgggggtattttgacttcaacagattccactgccacttctcaccacgtgactggcagcgactcatcaacaacaactggggattccggcctaagcgactcaacttcaagctcttcaacattcaggtcaaagaggttacggacaacaatggagtcaagaccatcgccaataaccttaccagcacggtccaggtcttcacggactcagactatcagctcccgtacgtgctcgggtcggctcacgagggctgcctcccgccgttcccagcggacgttttcatgattcctcagtacgggtatctgacgcttaatgatggaagccaggccgtgggtcgttcgtccttttactgcctggaatatttcccgtcgcaaatgctaagaacgggtaacaacttccagttcagctacgagtttgagaacgtacctttccatagcagctacgctcacagccaaagcctggaccgactaatgaatccactcatcgaccaatacttgtactatctctcaaagactattaacggttctggacagaatcaacaaacgctaaaattcagtgtggccggacccagcaacatggctgtccagggaagaaactacatacctggacccagctaccgacaacaacgtgtctcaaccactgtgactcaaaacaacaacagcgaatttgcttggcctggagcttcttcttgggctctcaatggacgtaatagcttgatgaatcctggacctgctatggccagccacaaagaaggagaggaccgtttctttcctttgtctggatctttaatttttggcaaacaaggaactggaagagacaacgtggatgcggacaaagtcatgataaccaacgaagaagaaattaaaactactaacccggtagcaacggagtcctatggacaagcggccacaaaccaccagagtgcccaagcacaggcgcagaccggctgggttcaaaaccaaggaatacttccgggtatggtttggcaggacagagatgtgtacctgcaaggacccatttgggccaaaattcctcacacggacggcaactttcacccttctccgctgatgggagggtttggaatgaagcacccgcctcctcagatcctcatcaaaaacacacctgtacctgcggatcctccaacggccttcaacaaggacaagctgaactctttcatcacccagtattctactggccaagtcagcgtggagatcgagtgggagctgcagaaggaaaacagcaagcgctggaacccggagatccagtacacttccaactattacaagtctaataatgttgaatttgctgttaatactgaaggtgtatatagtgaaccccgccccattggcaccagatacctgactcgtaatctg

SEQ ID NO: 623 - DNA, 2208 bp, Artificial Sequence
  Description of Artificial Sequence: Synthetic polynucleotide
atggctgccgatggttatcttccagattggctcgaggacaaccttagtgaaggaattcgcgagtggtgggctttgaaacctggagcccctcaacccaaggcaaatcaacaacatcaagacaacgctcggggtcttgtgcttccgggttacaaataccttggacccggcaacggactcgacaagggggagccggtcaacgcagcagacgcggcggccctcgagcacgacaaggcctacgaccagcagctcaaggccggagacaacccgtacctcaagtacaaccacgccgacgccgagttccaggagcggctcaaagaagatacgtcttttgggggcaacctcgggcgagcagtcttccaggccaaaaagaggcttcttgaacctcttggtccggttgaggaagcggctaagacggctcctggaaagaagaggcctgtagagcagtctcctcaggaaccggactcctccgcgggtattggcaaatcgggtgcacagcccgctaaaaagagactcaatttcggtcagactggcgacacagagtcagtcccagaccctcaaccaatcggagaacctcccgcagccccctcaggtgtgggatctcttacaatggcttcaggtggtggcgcaccagtggcagacaataacgaaggtgccgatggagtgggtagttcctcgggaaattggcattgcgattcccaatggctgggggacagagtcatcaccaccagcacccgaacctgggccctgcccacctacaacaatcacctctacaagcaaatctccaacagcacatctggaggatcttcaaatgacaacgcctacttcggctacagcaccccctgggggtattttgacttcaacagattccactgccacttctcaccacgtgactggcggcgactcatcaacaacaactggggattccggcctaagcgactcaacttcaagctcttcaacattcaggtcaaagaggttacggacaacaatggagtcaagaccatcgccaataaccttaccagcacggtccaggtcttcacggactcagactatcagctcccgtacgtgctcgggtcggctcacgagggctgcctcccgccgttcccagcggacgttttcatgattcctcagtacgggtatctgacgcttaatgatggaagccaggccgtgggtcgttcgtccttttactgcctggaatatttcccgtcgcaaatgctaagaacgggtaacaacttccagttcagctacgagtttgagaacgtacctttccatagcagctacgctcacagccaaagcctggaccgactaatgaatccactcatcgaccaatacttgtactatctctcaaagactattaacggttctggacagaatcaacaaacgctaaaattcagtgtggccggacccagcaacatggctgtccagggaagaaactacatacctggacccagctaccgacaacaacgtgtctcaaccactgtgactcaaaacaacaacagcgaatttgcttggcctggagcttcttcttgggctctcaatggacgtaatagcttgatgaatcctggacctgctatggccagccacaaagaaggagaggaccgtttctttcctttgtctggatctttaatttttggcaaacaaggaactggaagagacaacgtggatgcggacaaagtcatgataaccaacgaagaagaaattaaaactactaacccggtagcaacggagtcctatggacaagtggccacaaaccaccagagtgcccaagcacaggcgcagaccggctgggttcaaaaccaaggaatacttccgggtatggtttggcaggacagagatgtgtacctgcaaggacccatttgggccaaaattcctcacacggacggcaactttcacccttctccgctgatgggagggtttggaatgaagcacccgcctcctcagatcctcatcaaaaacacacctgtacctgcggatcctccaacggccttcaacaaggacaagctgaactctttcatcacccagtattctactggccaagtcagcgtggagatcgagtgggagctgcagaaggaaaacagcaagcgctggaacccggagatccagtacacttccaactattacaagtctaataatgttgaatttgctgttaatactgaaggtgtatatagtgaaccccgccccattggcaccagatacctgactcgtaatctg

SEQ ID NO: 624 - DNA, 2208 bp, Artificial Sequence
  Description of Artificial Sequence: Synthetic polynucleotide
atggctgccgatggttatcttccagattggctcgaggacaaccttagtgaaggaattcgcgagtggtgggctttgaaacctggagcccctcaacccaaggcaaatcaacaacatcaagacaacgctcgaggtcttgtgcttccgggttacaaataccttggacccggcaacggactcgacaagggggagccggtcaacgcagcagacgcggcggccctcgagcacgacaaggcctacgaccagcagctcaaggccggagacaacctgtacctcaagtacaaccacgccgacgccgagttccaggagcggctcaaagaagatacgtcttttgggggcaacctcgggcgagcagtcttccaggccaaaaagaggcttcttgaacctcttggtctggttgaggaagcggctaagacggctcctggaaagaagaggcctgtagagcagtctcctcaggaaccggactcctccgcgggtattggcaaatcgggtgcacagcccgctaaaaagagactcaatttcggtcagactggcgacacagagtcagtcccagaccctcaaccaatcggagaacctcccgcagccccctcaggtgtgggatctcttacaatggcttcaggtggtggcgcaccagtggcagacaataacgaaggtgccgatggagtgggtagttcctcgggaaattggcattgcgattcccaatggctgggggacagagtcatcaccaccagcacccgaacctgggccctgcccacctacaacaatcacctctacaagcaaatctccaacagcacatctggaggatcttcaaatgacaacgcctacttcggctacagcaccccctgggggtattttgacttcaacagattccactgccacttctcaccacgtgactggcagcgactcatcaacaacaactggggattccggcctaagcgactcaacttcaagctcttcaacattcaggtcaaagaggttacggacaacaatggagtcaagaccatcgccaataaccttaccagcacggtccaggtcttcacggactcagactatcagctcccgtacgtgctcgggtcggctcacgagggctgcctcccgccgttcccagcggacgttttcatgattcctcagtacgggtatctgacgcttaatgatggaagccaggccgtgggtcgttcgtccttttactgcctggaatatttcccgtcgcaaatgctaagaacgggtaacaacttccagttcagctacgagtttgagaacgtacctttccatagcagctacgctcacagccaaagcctggaccgactaatgaatccactcatcgaccaatacttgcactatctctcaaagactattaacggttctggacagaatcaacaaacgctaaaattcagtgtggccggacccagcaacatggctgtccagggaagaaactacatacctggacccagctaccgacaacaacgtgtctcaaccactgtgactcaaaacaacaacagcgaatttgcttggcctggagcttcttcttgggctctcaatggacgtaatagcttgatgaatcctggacctgctatggccagccacaaagaaggagaggaccgtttctttcctttgtctggatctttaatttttggcaaacaaggaactggaagagacaacgtggatgcggacaaagtcatgataaccaacgaagaagaaattaaaactactaacccggtagcaacggagtcctatggacaagtggccacaaaccaccagagtgcccaagcacaggcgcagaccggctgggttcaaaaccaaggaatacttccgggtatggtttggcaggacagagatgtgtacctgcaaggacccatttgggccaaaattcctcacacggacggcaactttcacccttctccgctgatgggagggtttggaatgaagcacccgcctcctcagatcctcatcaaaaacacacctgtacctgcggatcctccaacggccttcaacaaggacaagctgaactctttcatcacccagtattctactggccaagtcagcgtggagatcgagtgggagctgcagaaggaaaacagcaagcgctggaacccggagatccagtacacttccaactattacaagtctaataatgttgaatttgctgttaatactgaaggtgtatatagtgaaccccgccccattggcaccagatacctgactcgtaatctg

SEQ ID NO: 625 - DNA, 2208 bp, Artificial Sequence
  Description of Artificial Sequence: Synthetic polynucleotide
atggctgccgatggttatcttccagattggctcgaggacaaccttagtgaaggaattcgcgagtggtgggctttgaaacctggagcccctcaacccaaggcaaatcaacaacatcaagacaacgctcgaggtcttgtgcttccgggttacaaataccttggacccggcaacggactcgacaagggggagccggtcaacgcagcagacgcggcggccctcgagcacgacaaggcctacgaccagcagctcaaggccggagacaacccgtacctcaagtacaaccacgccgacgccgagttccaggagcggctcaaagaagatacgtcttttgggggcaacctcgggcgagcagtcttccaggccaaaaagaggcttcttgaacctcttggtctggttgaggaagcggctaagacggctcctggaaagaagaggcctgtagagcagtctcctcaagaaccggactcctccgcgggtattggcaaatcgggtgcacagcccgctaaaaagagactcaatttcggtcagactggcgacacagagtcagtcccagaccctcaaccaatcggagaacctcccgcagccccctcaggtgtgggatctcttacaatggcttcaggtggtggcgcaccagtggcagacaataacgaaggtgccgatggagtgggtagttcctcgggaaattggcattgcgattcccaatggctgggggacagagtcatcaccaccagcacccgaacctgggccctgcccacctacaacaatcacctctacaagcaaatctccaacagcacatctggaggatcttcaaatgacaacgcctacttcggctacagcaccccctgggggtattttgacttcaacagattccactgccacttctcaccacgtgactggcagcgactcatcaacaacaactggggattccggcctaagcgactcaacttcaagctcttcaacattcaggtcaaagaggttacggacaacaatggagtcaagaccatcgccaataaccttaccagcacggtccaggtcttcacggactcagactatcagctcccgtacgtgctcgggtcggctcacgagggctgcctcccgccgttcccagcggacgttttcatgattcctcagtacgggtatctgacgcttaatgatggaagccaggccgtgggtcgttcgtccttttactgcctggaatatttcccgtcgcaaatgctaagaacgggtaacaacttccagttcagctacgagtttgagaacgtacctttccatagcagctacgctcacagccaaagcctggaccgactaatgaatccactcatcgaccaatacttgcactatctctcaaagactattaacggttctggacagaatcaacaaacgctaaaattcagtgtggccggacccagcaacatggctgtccagggaagaaactacatacctggacccagctaccgacaacaacgtgtctcaaccactgtgactcaaaacaacaacagcgaatttgcttggcctggagcttcttcttgggctctcaatggacgtaatagcttgatgaatcctggacctgctatggccagccacaaagaaggagaggaccgtttctttcctttgtctggatctttaatttttggcaaacaaggaactggaagagacaacgtggatgcggacaaagtcatgataaccaacgaagaagaaattaaaactactaacccggtagcaacggagtcctatggacaagtggccacaaaccaccagagtgcccaagcacaggcgcagaccggctgggttcaaaaccaaggaatacttccgggtatggtttggcaggacagagatgtgtacctgcaaggacccatttgggccaaaattcctcacacggacggcaactttcacccttctccgctgatgggagggtttggaatgaagcacccgcctcctcagatcctcatcaaaaacacacctgtacctgcggatcctccaacggccttcaacaaggacaagctgaactctttcatcacccagtattctactggccaagtcagcgtggagatcgagtgggagctgcagaaggaaaacagcaagcgctggaacccggagatccagtacacttccaactattacaagtctaataatgttgaatttgctgttaatactgaaggtgtatatagtgaaccccgccccattggcaccagatacctgactcgtaatctg

SEQ ID NO: 626 - DNA, 2208 bp, Artificial Sequence
  Description of Artificial Sequence: Synthetic polynucleotide
  modified_base (1325)..(1325): a, c, g, or t
atggctgccgatggttatcttccagattggctcgaggacaaccttagtgaaggaattcgcgagtggtgggctttgaaacctggagcccctcaacccaaggcaaatcaacaacatcaagacaacgctcgaggtcttgtgcttccgggttacaaataccttggacccggcaacggactcgacaagggggagccggtcaacgcagcagacgcggcggccctcgagcacgacaaggcctacgaccagcagctcaaggccggagacaacccgtacctcaagtacaaccacgccgacgccgagttccaggagcggctcaaagaagatacgtcttttgggggcaacctcgggcgagcagtcttccaggccaaaaagaggcttcttgaacctcttggtctggttgaggaagcggctaagacggctcctggaaagaagaggcctgtagagcagtctcctcaggaaccggactcctccgcgggtattggcaaatcgggtgcacagcccgctaaaaagagactcaatttcggtcagactggcgacacagagtcagtcccagaccctcaaccaatcggagaacctcccgcagccccctcaggtgtgggatctcttacaatggcttcaggtggtggcgcaccagtggcagacaataacgaaggtgccgatggagtgggtagttcctcgggaaattggcattgcgattcccaatggctgggggacagagtcatcaccaccagcacccgaacctgggccctgcccacctacaacaatcacctctacaagcaaatctccaccagcacatctggaggatcttcaaatgacaacgcctacttcggctacagcaccccctgggggtattttgacttcaacagattccactgccacttctcaccacgtgactggcagcgactcatcaacaacaactggggattccggcctaagcgactcaacttcaagctcttcaacattcaggtcaaagaggttacggacaacaatggagtcaagaccatcgccaataaccttaccagcacggtccaggtcttcacggactcagactatcagctcccgtacgtgctcgggtcggctcacgagggctgcctcccgccgttcccagcggacgttttcatgattcctcagtacgggtatctgacgcttaatgatggaagccaggccgtgggtcgttcgtccttttactgcctggaatatttcccgtcgcaaatgctaagaacgggtaacaacttccagttcagctacgagtttgagaacgtacctttccatagcagctacgctcacagccaaagcctggaccgactaatgaatccactcatcgaccnatacttgcactatctctcaaagactattaacggttctggacagaatcaacaaacgctaaaattcagtgtggccggacccagcaacatggctgtccagggaagaaactacatacctggacccagctaccgacaacaacgtgtctcaaccactgtgactcaaaacaacaacagcgaatttgcttggcctggagcttcttcttgggctctcaatggacgtaatagcttgatgaatcctggacctgctatggccagccacaaagaaggagaggaccgtttctttcctttgtctggatctttaatttttggcaaacaaggaactggaagagacaacgtggatgcggacaaagtcatgataaccaacgaagaagaaattaaaactactaacccggtagcaacggagtcctatggacaagtggccacaaaccaccagagtgcccaagcacaggcgcagaccggctgggttcaaaaccaaggaatacttccggatatggtttggcaggacagagatgtgtacctgcaaggacccatttgggccaaaattcctcacacggacggcaactttcacccttctccgctgatgggagggtttggaatgaagcacccgcctcctcagatcctcatcaaaaacacacctgtacctgcggatcctccaacggccttcaacaaggacaagctgaactctttcatcacccagtattctactggccaagtcagcgtggagatcgagtgggagctgcagaaggaaaacagcaagcgctggaacccggagatccagtacacttccaactattacaagtctaataatgttgaatttgctgttaatactgaaggtgtatatagtgaaccccgccccattggcaccagatacctgactcgtaatctg

SEQ ID NO: 627 - DNA, 2208 bp, Artificial Sequence
  Description of Artificial Sequence: Synthetic polynucleotide
atggctgccgatggttatcttccagattggctcgaggacaaccttagtgaaggaattcgcgagtggtgggctttgaaacctggagcccctcaacccaaggcaaatcaacaacatcaagacaacgctcgaggtcttgtgcttccgggttacaaataccttggacccggcaacggactcgacaagggggagccggtcaacgcagcagacgcggcggccctcgagcacgacaaggcctacgaccagcagctcaaggccggagacaacccgtacctcaagtacaaccacgccgacgccgagttccaggagcggctcaaagaagatacgtcttttgggggcaacctcgggcgagcagtcttccaggccaaaaagaggcttcttgaacctcttggtctggttgaggaagcggctaagacggctcctggaaagaagaggcctgtagagcagtctcctcaggaaccggactcctccgcgggtattggcaaatcgggtgcacagcccgctaaaaagagactcaatttcggtcagactggcgacacagagtcagtcccagaccctcaaccaatcggagaacctcccgcagccccctcaggtgtgggatctcttacaatggcttcaggtggtggcgcaccagtggcagacaataacgaaggtgccgatggagtgggtagttcctcgggaaattggcattgcgattcccaatggctgggggacagagtcatcaccaccagcacccgaacctgggccctgcccacctacaacaatcacctctacaagcaaatctccaacagcacatctggaggatcttcaaatgacaacgcctacttcggctacagcaccccctgggggtattttgacttcaacagattccactgccacttctcaccacgtgactggcagcgactcatcaacaacaactggggattccggcctaagcgactcaacttcaagctcttcaacattcaggtcaaagaggttacggacaacaatggagtcaagaccatcgccaataaccttaccagcacggtccaggtcttcacggactcagactatcagctcccgtacgtgctcgggtcggctcacgagggctgcctcccgccgttcccagcggacgttttcatgattcctcagtacgggtatctgacgcttaatgatggaagccaggccgtgggtcgttcgtccttttactgcctggaatatttcccgtcgcaaatgctaagaacgggtaacaacttccagttcagctacgagtttgagaacgtacctttccatagcagctacgctcacagccaaagcctggaccgactaatgaatccactcatcgaccaatacttgcactatctctcaaagactattaacggttctggacagaatcaacaaacgctaaaattcagtgtggccggacccagcaacatggctgtccagggaagaaactacatacctggacccagctaccgacaacaacgtgtctcaaccactgtgactcaaaacaacaacagcgaatttgcttggcctggagcttcttcttgggctctcaatggacgtaatagcttgatgaatcctggacctgctatggccagctacaaagaaggagaggacagtttctttcctttgtctggatctttaatttttggcaaacaaggaactggaagagacaacgtggatgcggacaaagtcatgataaccaacgaagaagaaattaaaactactaacccggtagcaacggagtcctatggacaagtggccacaaaccaccagagtgcccaagcacaggcgcagaccggctgggttcaaaaccaaggaatacttccgggtatggtttggcaggacagagatgtgtacctgcaaggacccatttgggccaaaattcctcacacggacggcaactttcacccttctccgctgatgggagggtttggaatgaagcacccgcctcctcagaccctcatcaaaaacacacctgtacctgcggatcctccaacggccttcaacaaggacaagctgaactctttcatcacccagtattctactggccaagtcagcgtggagatcgagtgggagctgcagaaggaaaacagcaagcgctggaacccggagatccagtacacttccaactattacaagtctaataatgttgaatttgctgttaatactgaaggtgtatatagtgaaccccgccccattggcaccagatacctgactcgtaatctg

SEQ ID NO: 628 - DNA, 2208 bp, Artificial Sequence; identical to SEQ ID NO: 611
  Description of Artificial Sequence: Synthetic polynucleotide

SEQ ID NO: 629 - DNA, 2208 bp, Artificial Sequence
  Description of Artificial Sequence: Synthetic polynucleotide
atggctgccgatggttatcttccagattggctcgaggacaaccttagtgaaggaattcgcgagtggtgggctttgaaacctggagcccctcaacccagggcaaatcaacaacatcaagacaacgctcgaggtcttgtgcttccgggttacaaataccttggacccggcaacggactcgacaagggggagccggtcaacgcagccgacgcggcggccctcgagcacgacaaggcctacgaccagcagctcaaggccggagacaacccgtacctcaagtacaaccacgccgacgccgagttccaggagcggctcaaagaagatacgtcttttgggggcaacctcgggcgagcagtcttccaggccaaaaagaggcttcttgaacctcttggtctggttgaggaagcggctaagacggctcctggaaagaagaggcctgtagagcagtctcctcaggaaccggactcctccgcgggtattggcaaatcgggtgcacagcccgctaaaaagagactcaatttcggtcagactggcgacacagagtcagtcccagaccctcaaccaatcggagaacctcccgcagccccctcaggtgtgggatctcttacaatggcttcaggtggtggcgcaccagtggcagacaataacgaaggtgccgatggagtgggtagttcctcgggaaattggcattgcgattcccaatggctgggggacagagtcatcaccaccagcacccgaacctgggccctgcccacctacaacaatcacctctacaagcaaatctccaacagcacatctggaggatcttcaaatgacaacgcctacttcggctacagcaccccctgggggtattttgacttcaacagattccactgccacttctcaccacgtgactggcagcgactcatcaacaacaactggggattccggcctaagcgactcaacttcaagctcttcaacattcaggtcaaagaggttacggacaacaatggagtcaagaccatcgccaataaccttaccagcacggtccaggtcttcacggactcagactgtcagctcccgtacgtgctcgggtcggctcacgagggctgcctcccgccgttcccagcggacgttttcatgattcctcagtacgggtatctgacgcttaatgatggaagccaggccgtgggtcgttcgtccttttactgcctggaatatttcccgtcgcaaatgctaagaacgggtaacaacttccagttcagctacgagtttgagaacgtacctttccatagcagctacgctcacagccaaagcctggaccgactaacgaatccactcatcgaccaatacttgtactatctctcaaagactattaacggttctggacagaatcaacaaacgctaaaattcagtgtggccggacccagcaacatggctgtccagggaagaaactacatacctggacccagctaccgacaacaacgtgtctcaaccactgtgactcaaaacaacaacagcgaatttgcttggcctggagcttcttcttgggctctcaatggacgtaatagcttgatgaatcctggacctgctatggccagccacaaagaaggagaggaccgtttctttcctttgtctggatctttaatttttggcaaacaaggaactggaagagacaacgtggatgcggacaaagtcatgataaccaacgaagaagaaattaaaactactaacccggtagcaacggagtcccatggacaagtggccacaaaccaccagagtgcccaagcacaggcgcagaccggctgggttcaaaaccaaggaatacttccgggtatggtttggcaggacagagatgtgtacctgcaaggacccatttgggccaaaattcctcacacggacggcaactttcacccttctccgctgatgggagggtttggaatgaagcacccgcctcctcagatcctcatcaaaaacacacctgtacctgcggatcctccaacggccttcaacaaggacaagctgaactctttcatcacccagtattctactggccaagtcagcgtggagatcgagtgggagctgcagaaggaaaacagcaagcgctggaacccggagatccagtacacttccaactattacaagtctaataatgttgaatttgctgttaatactgaaggtgtatatagtgaaccccgccccattggcaccagatacctgactcgtaatctg

SEQ ID NO: 630 - DNA, 2208 bp, Artificial Sequence
  Description of Artificial Sequence: Synthetic polynucleotide
atggctgccgatggttatcttccagattggctcgaggacaaccttagtgaaggaattcgcgagtggtgggctttgaaacctggagcccctcaacccaaggcaaatcaacaacatcaagacaacgctcgaggtcttgtgcttccgggttacaaataccttggacccggcaacggactcgacaagggggagccggtcaacgcagcagacgcggcggccctcgagcacgacaaggcctacgaccagcagctcaaggccggagacaacccgtacctcaagtacaaccacgccgacgccgagttccaggagcggctcaaagaagatacgtcttttgggggcaacctcgggcgagcagtcttccaggccaaaaagaggcttcttgaacctcttggtctggttgaggaagcggctaagacggctcctggaaagaagaggcctgtagagcagtctcctcaggaaccggactcctccgcgggtattggcaaatcgggtgcacagcccgctaagaagagactcaatttcggtcagactggcgacacagagtcagtcccagaccctcaaccaatcggagaacctcccgcagccccctcaggtgtgggatctcttacaatggcttcaggtggtggcgcaccagtggcagacaataacgaaggtgccgatggagtgggtagttcctcgggaaattggcattgcgattcccaatggctgggggacagagtcatcaccaccagcacccgaacctgggccctgcccacctacaacaatcacctctacaagcaaatctccaacagcacatctggaggatcttcaaatgacaacgcctacttcggctacagcaccccctgggggtattttgacttcaacagattccactgccacttctcaccacgtgactggcagcgactcatcaacaacaactggggattccggcctaagcgactcaacttcaagctcttcaacattcaggtcaaagaggttacggacaacaatggagtcaagaccatcgccaataaccttaccagcacggtccaggtcttcacggactcagactatcagctcccgtacgtgctcgggtcggctcacgagggctgcctcccgccgttcccagcggacgttttcatgattcctcagtacgggtatctgacgcttaatgatggaagccaggccgtgggtcgttcgtccttttactgcctggaatatttcccgtcgcaaatgctaagaacgggtaacaacttccagttcagctacgagtttgagaacgtacctttccatagcagctacgctcacagccaaagcctggaccgactaatgaatccacccatcgaccaatacttgtactatctctcaaagactattaacggttctggacagaatcaacaaacgctaaaattcagtgtggccggacccagcaacatggctgtccagggaagaaactacatacctggacccagctaccgacaacaacgtgtctcaaccactgtgactcaaaacaacaacagcgaatttgcttggcctggagcttcttcttgggctctcaatggacgtaatagcttgatgaatcctggacctgctatggccagccacaaagaaggagaggaccgtttctttcctttgtctggatctttaatttttggcaaacaaggaactggaagagacaacgtggatgcggacaaagtcatgataaccaacgaagaagaaattaaaactactaacccggtagcaacggagtcctatggacaagtggccacaaaccaccagagtgcccaagcacaggcgcagaccggctgggttcaaaaccaaggaatacttccgggtatggtttggcaggacagagatgtgtacctgcaaggacccatttgggccaaaattcctcacacggacggcaactttcacccttctccgctgatgggagggtttggaatgaagcacccgcctcctcagatcctcatcaaaaacacacctgtacctgcggatcctccaacggccttcaacaaggacaagctgaactctttcatcacccagtattctactggccaagtcagcgtggagatcgagtgggagctgcagaaggaaaacagcaagcgctggaacccggagatccagtacacttccaactattacaagtctaataatgttgaatttgctgttaatactgaaggtgtatatggtgaaccccgccccattggcaccagatacctgactcgtaatctg

SEQ ID NO: 631 - DNA, 2208 bp, Artificial Sequence
  Description of Artificial Sequence: Synthetic polynucleotide
atggctgccgatggttatcttccagattggctcgaggacaaccttagtgaaggaattcgcgagtggtgggctttgaaacctggagcccctcaacccaaggcaaatcaacaacatcaagacaacgctcgaggtcttgtgcttccgggttacaaataccttggacccggcaacggactcgacaagggggagccggtcaacgcagcagacgcggcggccctcgagcacgacaaggcctacgaccagcagctcaaggccggagacaacccgtacctcaagtacaaccacgccgacgccgagttccaggagcggctcaaagaagatacgtcttttgggggcaacctcgggcgagcagtcttccaggccaaaaagaggcttcttgaacctcttggtctggttgaggaagcggctaagacggctcctggaaagaagaggcctgtagagcagtctcctcaggaaccggactcctccgcgggtattggcaaatcgggtgcacagcccgctaaaaagagactcaatttcggtcagactggcgacacagagtcagtcccagaccctcaaccaatcggagaacctcccgcagccccctcaggtgtgggatctcttacaatggcttcaggtggtggcgcaccagtggcagacaataacgaaggtgccgatggagtgggtagttcctcgggaaattggcattgcgattcccaatggctgggggacagagtcatcaccaccagcacccgaacctgggccctgcccacctacaacaatcacctctacaagcaaatctccaacagcacatctggaggatcttcaaatgacaacgcctacttcggctacagcaccccctgggggtattttgacttcaacagattccactgccacttctcaccacgtgaccggcagcgactcatcaacaacaactggggattccggcctaagcgactcaacttcaagctcttcaacattcaggtcaaagaggttacggacaacaatggagtcaagaccatcgccaataaccttaccagcacggtccaggtcttcacggactcagactatcagctcccgtacgtgctcgggtcggctcacgagggctgcctcccgccgttcccagcggacgttttcatgattcctcagtacgggtatctgacgcttaatgatggaagccaggccgtgggtcgttcgtccttttactgcctggaatatttcccgtcgcaaatgctaagaacgggtaacaacttccagttcagctacgagtttgagaacgtacctttccatagcagctacgctcacagccaaagcctggaccgactaatgaatccactcatcgaccaatacttgtactatctctcaaagactattaacggttctggacagaatcaacaaacgctaaaattcagtgtggccggacccagcaacatggctgtccagggaagaaactacatacctggacccagctaccgacaacaacgtgtctcaaccactgtgactcaaaacaacaacagcgaatttgcttggcctggagcttcttcttgggctctcaatggacgtaatagcttgatgaatcctggacctgctatggccagccacaaagaaggagaggaccgtttctttcctttgtctggatctttaatttttggcaaacaaggaactggaagagacaacgtggatgcggacaaagtcatgataaccaacgaagaagaaattaaaactactaacccggtagcaacggagtcctatggacaagtggccacaaaccaccagagtgcccaagcacaggcgcagaccggctgggttcaaaaccaaggaatacttccgggtatggtttggcaggacagagatgtgtacctgcaaggacccatttgggccaaaattcctcacacggacggcaactttcacccttctccgctgatgggagggtttggaatgaagcacccgcctcctcagatcctcatcaaaaacacacctgtacctgcggatcctccaacggccttcaacaaggacaagctgaactctttcatcacccagtattctactggccaagtcagcgtggagatcgagtgggagctgcagaaggaaaacagcaagcgctggaacccggagatccagtacacttccaactattacaagtctaataatgttgaatttgctgttaatactgaaggtgtatatagtgaaccccgccccattggcaccagatacctgactcgtaatctg

SEQ ID NO: 632 - DNA, 2208 bp, Artificial Sequence
  Description of Artificial Sequence: Synthetic polynucleotide
atggctgccgatggttatcttccagattggctcgaggacaaccttagtgaaggaattcgcgagtggtgggctttgaaacctggagcccctcaacccaaggcaaatcaacaacatcaagacaacgctcgaggtcttgtgcttccgggttacaaataccttggacccggcaacggactcgacaagggggagccggtcaacgcagcagacgcggcagccctcgagcacgacaaggcctacgaccagcagctcaaggccggagacaacccgtacctcaagtacaaccacgccgacgccgagttccaggagcggctcaaagaagatacgtcttttgggggcaacctcgggcgagcagtcttccaggccaaaaagaggcttcttgaacctcttggtctggttgaggaagcggctaagacggctcctggaaagaagaggcctgtagagcagtctcctcaggaaccggactcctccgcgggtattggcaaatcgggtgcacagcccgctaaaaagagactcaatttcggtcagactggcgacacagagtcagtcccagaccctcaaccaatcggagaacctcccgcagccccctcaggtgtgggatctcttacaatggcttcaggtggtggcgcaccagtggcagacaataacgaaggtgccgatggagtgggtagttcctcgggaaattggcattgcaattcccaatggctgggggacagagtcatcaccaccagcacccgaacctgggccctgcccacctacaacaatcacctctacaagcaaatctccaacagcacatctggaggatcttcaaatgacaacgcctacttcggctacagcaccccctgggggtattttgacttcaacagattccactgccacttctcaccacgtgactggcagcgactcatcaacaacaactggggattccggcctaagcgactcaacttcaagctcttcaacattcaggtcaaagaggttacggacaacaatggagtcaagaccatcgccaataaccttaccagcacggtccaggtcttcacggactcagactatcagctcccgtacgtgctcgggtcggctcacgagggctgcctcccgccgttcccagcggacgttttcatgattcctcagtacgggtatctgacgcttaatgatggaagccaggccgtgggtcgttcgtccttttactgcctggaatatttcccgtcgcaaatgctaagaacgggtaacaacttccagttcagctacgagtttgagaacgtacctttccatagcagctacgctcacagccaaagcctggaccgactaatgaatccactcatcgaccaatacttgtactatctctcaaagactattaacggttctggacagaatcaacaaacgctaaaattcagtgtggccggacccggcaacatggctgtccagggaagaaactacatacctggacccagctaccgacaacaacgtgtctcaaccactgtgactcaaaacaacaacagcgaatttgcttggcctggagcttcttcttgggctctcaatggacgtaatagcttgatgaatcctggacctgctatggccagccacaaagaaggagaggaccgtttctttcctttgtctggatctttaatttttggcaaacaaggaactggaagagacaacgtggatgcggacaaagtcatgataaccaacgaagaagaaattaaaactactaacccggtagcaacggagtcctatggacaagtggccacaaaccaccagagtgcccaagcacaggcgcagaccggctgggttcaaaaccaaggaatacttccgggtatggtttggcaggacagagatgtgtacctgcaaggacccatttgggccaaaattcctcacacggacggcaactttcacccttctccgctgatgggagggtttggaatgaagcacccgcctcctcagatcctcatcaagaacacacctgtacctgcggatcctccaacggccttcaacaaggacaagctgaactctttcatcacccagtattctactggccaagtcagcgtggagatcgagtgggagctgcagaaggaaaacagcaagcgctggaacccggagatccagtacacttccaactattacaagtctaataatgttgaatttgctgttaatactgaaggtgtatatagtgaaccccgccccattggcaccagatacctgactcgtaatctg

SEQ ID NO: 633 - DNA, 2208 bp, Artificial Sequence
  Description of Artificial Sequence: Synthetic polynucleotide
atggctgccgatggttatcttccagattggctcgaggacaaccttagtgaaggaattcgcgagtggtgggctttgaaacctggagcccctcaacccaaggcaaatcaacaacatcaagacaacgctcgaggtcttgtgcttccgggttacagataccttggacccggcaacggactcgacaagggggagccggtcaacgcagcagacgcggcggccctcgagcacgacaaggcctacgaccagcagctcaaggccggagacaacccgtacctcaagtacaaccacgccgacgccgagttccaggagcggctcaaagaagatacgtcttttgggggtaacctcgggcgagcagtcttccaggccaaaaagaggcttcttgaacctcttggtctggttgaggaagcggctaagacggctcctggaaagaagaggcctgtagagcagtctcctcaggaaccggactcctccgcgggtatcggcaaatcgggtgcacagcccgctaaaaagagactcaatttcggtcagactggcgacacagagtcagtcccagaccctcaaccaatcggagaacctcccgcagccccctcaggtgtgggatctcttacaatggcttcaggtggtggcgcaccagtggcagacaataacgaaggtgccgatggagtgggtagttcctcgggaaattggcattgcgattcccaatggctgggggacagagtcatcaccaccagcacccgaacctgggccctgcccacctacaacaatcacctctacaagcaaatctccaacagcacatctggaggatcttcaaatgacaacgcctacttcggctacagcaccccctgggggtattttgacttcaacagattccactgccacttctcaccacgtgactggcagcgactcatcaacaacaactggggattccggcctaagcgactcaacttcaagctcttcaacattcaggtcaaagaggttacggacaacaatggagtcaagaccgtcgccaataaccttaccagcacggtccaggtcttcacggactcagactatcagctcccgtacgtgctcgggtcggctcacgagggctgcctcccgccgttcccagcggacgttttcatgattcctcagtacgggtatctgacgcttaatgatggaagccaggccgtgggtcgttcgtccttttactgcctggaatatttcccgtcgcaaatgctaagaacgggtaacaacttccagttcagctacgagtttgagaacgtacctttccatagcagctacgctcacagccaaagcctggaccgactaatgaatccactcatcgaccaatacttgtactatctctcaaagactattaacggttctggacagaatcaacaaacgctaaaattcagtgtggccggacccagcaacatggctgtccagggaagaaactacatacctggacccagctaccgacaacaacgtgtctcaaccactgtgactcaaaacaacaacagcgaatttgcttggcctggagcttcttcttgggctctcaatggacgtaatagcttgatgaatcctggacctgctatggccagccacaaagaaggagaggaccgtttctttcctttgtctggatctttaatttttggcaaacaaggaactggaagagacaacgtggatgcggacaaagtcatgataaccaacgaagaagaaattaaaactactaacccggtagcaacggagtcctatggacaagtggccacaaaccaccagagtgcccaagcacaggcgcagaccggctgggttcaaaaccaaggaatacttccgggtatggtttggcaggacagagatgtgtacctgcaaggacccatttgggccaaaattcctcacacggacggcaactttcacccttctccgctgatgggagggtttggaatgaagcacccgcctcctcagatcctcatcaaaaacacacctgtacctgcggatcctccaacggccttcaacaaggacaagctgaactctttcatcacccagtattctactggccaagtcagcgtggagatcgagtgggagctgcagaaggaaaacagcaagcgctggaacccggagatccagtacacttccaactattacaagtctaataatgttgaatttgctgttaatactgaaggtgtatatagtggaccccgccccattggcaccagatacctgactcgtaatctg

SEQ ID NO: 634 - DNA, 2208 bp, Artificial Sequence
  Description of Artificial Sequence: Synthetic polynucleotide
atggctgccgatggttatcttccagattggctcgaggacaaccttagtgaaggaattcgcgagtggtgggctttgaaacctggagcccctcaacccaaggcaaatcaacaacatcaagacaacgctcgaggtcttgtgcttccgggttacaaataccttggacccggcaacggactcgacaagggggagccggtcaacgcagcagacgcggcggccctcgagcacgacaaggcctacgaccagcagctcaaggccggagacaacccgtacctcaagtacaaccacgccgacgccgagttccaggagcggctcaaagaagatacgtcttttgggggcaacctcgggcgagcagtcttccaggccaaaaagaggcttcttgaacctcttggtctggttgaggaagcggctaagacggctcctggaaagaagaggcctgtagagcagtctcctcaggaaccggactcctccgcgggtattggcaaatcgggtgcacagcccgctaaaaagagactcaatttcggtcagactggcgacacagagtcagtcccagaccctcaaccaatcggagaacctcccgcagccccctcaggtgtgggatctcttacaatggcttcaggtggtggcgcaccagtggcagacaataacgaaggtgccgatggagtgggtagttcctcgggaaattggcattgcgattcccaatggctgggggacagagtcatcaccaccagcacccgaacctgggccctgcccacctacaacaatcacctctacaagcaaatctccaacagcacatctggaggatcttcaaatgacaacgcctacttcggctacagcaccccctgggggtattttgacttcaacagattccactgccacttctcaccacgtgactggcagcgactcatcaacaacaactggggattccggcctaagcgactcaacttcaagctcttcaacattcaggtcaaagaggttacggacaacaatggagtcaagaccatcgccaataaccttaccagcacggtccaggtcttcacggactcagactatcagctcccgtacgtgctcgggtcggctcacgagggctgcctcccgccgttcccagcggacgttttcatgattcctcagtacgggtatctgacgcttaatgatggaagccaggccgtgggtcgttcgtccttttactgcctggaatatttcccgtcgcaaatgctaagaacgggtaacaacttccagttcagctacgagtttgagaacgtacctttccatagcagctacgctcacagccaaagcctggaccgactaatgaatccactcatcgaccaatacttgtactatctctcaaagactattaacggttctggacagaatcaacaaacgctaaaattcagtgtggccggacccagcaacatggctgtccagggaagaaactacatacctggacccagctaccgacaacaacgtgtctcaaccactgtgactcaaaacaacaacagcgaatttgcttggcctggagcttcttcttgggctctcaatggacgtaatagcttgatgaatcctggacctgctatggccagccacaaagaaggagaggaccgtttctttcctttgtctggatctttaatttttggcaaacaaggaactggaagagacaacgtggatgcggacaaagtcatgataaccaacgaagaagaaattaaaactactaacccggtagcaacggagtcctatggacaagtggccacaaaccaccagagtgcccaagcacaggcgcagaccggctgggttcaaaaccaaggaatacttccgggtatggtttggcaggacagagatgtgtacctgcaaggacccatttgggccaaaattcctcacacggacggcaactttcacccttctccgctgatgggagggtttggaatgaagcacccgcctcctcagatcctcatcaaaaacacacctgtacctgcggatcctccaacggccttcaacaaggacaagctgaactctttcatcacccagtattctactggccaagtcagcgtggagatcgagtgggagctgcagaaggaaaacagcaagcgctggaacccggagatccagtacacttccaactattacaagtctaataatgttgaatttgctgttaatactgaaggtgtatatagtgaaccccgccccattggcaccagatacctgactcgtaatctg

SEQ ID NO: 635 - DNA, 2208 bp, Artificial Sequence
  Description of Artificial Sequence: Synthetic polynucleotide
atggctgccgatggttatcttccagattggctcgaggacaaccttagtgaaggaattcgcgagtggtgggctttgaaacctggagcccctcaacccaaggcaaatcaacaacgtcaagacaacgctcgaggtcttgtgcttccgggttacaaataccttggacccggcaacggactcgacaagggggagccggtcaacgcagcagacgcggcggccctcgagcacgacaaggcctacgaccagcagctcaaggccggaggcaacccgtgcctcaagtacaaccacgccgacgccgagttccaggagcggctcaaagaagatacgtcttttgggggcaacctcgggcgagcagtcttccaggccaaaaagaggcttcttgaacctcttggtctggttgaggaagcggctaagacggctcctggaaagaagaggcctgtagagcagtctcctcaggaaccggactcctccgcgggtattggcagatcgggtgcacagcccgctaaaaagagactcaatttcggtcagactggcgacacagagtcagtcccagaccctcaaccaatcggagaacctcccgcagccccctcaggtgtgggatctcttacaatggcttcaggtggtggcgcaccagtggcagacaataacgaaggtgccgatggagtgggtagttcctcgggaaattggcattgcgattcccaatggctgggggacagagtcatcaccaccagcacccgaacctgggccctgcccacctacaacaatcacctctacaagcaaatctccaacagcacatctggaggatcttcaaatgacaacgcctacttcggctacagcaccccctgggggtattttgacttcaacagattccactgccacttctcaccacgtgactggcagcgactcatcaacaacaactggggattccggcctaagcgactcaacttcaagctcttcaacattcaggtcaaagaggttacggacaacaatggagtcaaggccatcgccaataaccttaccagcacggtccaggtcttcacggactcagactatcagctcccgtacgtgctcgggtcggctcacgagggctgcctcccgccgttcccagcggacgttttcatgattcctcagtacgggtatctgacgcttaatgatggaagccaggccgtgggtcgttcgtccttttactgcctggaatatttcccgtcgcaaatgctaagaacgggtaacaacttccagttcagctacgagtttgagaacgtacctttccatagcagctacgctcacagccaaagcctggaccgactaatgaatccactcatcgaccaatacttgtactatctctcaaagactattgacggttctggacagaatcaacaaacgctaaaattcagtgtggccggacccagcaacatggctgtccagggaagaaactacatacctggacccagctaccgacaacaacgtgtctcaaccactgtgactcaaaacaacaacagcgaatttgcttggcctggagcttcttcttgggctctcaatggacgtaatagcttgatggatcctggacctgctatggccagccacaaagaaggagaggaccgtttctttcctttgtctggatctttaatttttggcaaacaaggaactggaagagacaacgtggatgcggacaaagtcatgataaccaacgaagaagaaattaaaactactaacccggtagcaacggagtcctatggacaagtggccacaaaccaccagagtgcccaagcacaggcgcagaccggctgggttcaaaaccaaggaatacttccgggtatggtttggcaggacagagatgtgtacctgcaaggacccatttgggccaaaattcctcacacgggcggcaactttcacccttctccgctgatgggagggtttggaatgaagcacccgcctcctcagatcctcatcaaaaacacacctgtacctgcggatcctccaacggccttcaacaaggacaagctgaactctttcatcacccagtattctactggccaagtcagcgtggagatcgagtgggagctgcagaaggaaaacagcaagcgctggaacccggagatccagtacacttccaactattacaagtctaataatgttgaatttgctgttaatactgaaggtgtatatagtgaaccccgccccattggcaccagatacctgactcgtaatctg

SEQ ID NO: 636 - DNA, 2208 bp, Artificial Sequence
  Description of Artificial Sequence: Synthetic polynucleotide
atggctgccgatggttatcttccagattggctcgaggacaaccttagtgaaggaattcgcgagtggtgggctttgaaacctggagcccctcaacccaaggcaaatcaacaacatcaagacaacgctcgaggtcttgtgcttccgggttacaaataccttggacccggcaacggactcgacaagggggagccggtcaacgcagcagacgcggcggccctcgagcacgacaaggcctacgaccagcagctcaaggccggagacaacccgtacctcaagtacaaccacgccgacgccgagttccaggagcggctcaaagaagatacgtcttttgggggcaacctcgggcgagcagtcttccaggccaaaaagaggcttcttgaacctcttggtctggttgaggaagcggctaagacggctcctggaaagaagaggcctgtagagcagtctcctcaggaaccggactcctccgcgggtattggcaaatcgggtgcacagcccgctaaaaagagactcaatttcggtcagactggcgacacagagtcagtcccagaccctcaaccaatcggagaacctcccgcagccccctcaggtgtgggatctcttacaatggcttcaggtggtggcgcaccagtggcagacaataacgaaggtgccgatggagtgggtagttcctcgggaaattggcattgcgattcccaatggctgggggacagagtcatcaccaccagcacccgaacctgggccctgcccacctacaacaatcacctctacaagcaaatctccaacagcacatctggaggatcttcaaatgacaacgcctacttcggctacagcaccccctgggggtattttgacttcaacagattccactgccacttctcaccacgtgactggcagcgactcatcaacaacaactggggattccggcctaagcgactcaacttcaagctcttcaacattcaggtcaaagaggttacggacaacaatggagtcaagaccatcgccaataaccttaccagcacggtccaggtcttcacggactcagactatcagctcccgtacgtgctcgggtcggctcacgagggctgcctcccgccgttcccagcggacgttttcatgattcctcagtacgggtatctgacgcttaatgatggaagccaggccgtgggtcgttcgtccttttactgcctggaatatttcccgtcgcaaatgctaagaacgggtaacaacttccagttcagctacgagtttgagaacgtacctttccatagcagctacgctcacagccaaagcctggaccgactaatgaatccactcatcgaccaatacttgtactatctctcaaagactattaacggttctggacagaatcaacaaacgctaaaattcagtgtggccggacccagcaacatggctgtccagggaagaaactacatacctggacccagctaccgacaacaacgtgtctcaaccactgtgactcaaaacaacaacagcgaatttgcttggcctggagcttcttcttgggctctcaatggacgtaatagcttgatgaatcctggacctgctatggccagccacaaagaaggagaggaccgtttctttcctttgtctggatctttaatttttggcaaacaaggaactggaagagacaacgtggatgcggacaaagtcatgataaccaacgaagaagaaattaaaactactaacccggtagcaacggagtcctatggacaagtggccacaaaccaccagagtgcccaagcacaggcgcagaccggctgggttcaaaaccaaggaatacttccgggtatggtttggcaggacagagatgtgtacctgcaaggacccatttgggccaaaattcctcacacggacggcaactttcacccttctccgctgatgggagggtttggaatgaagcacccgcctcctcagatcctcatcaaaaacacacctgtacctgcggatcctccaacggccttcaacaaggacaagctgaactctttcatcacccagtattctactggccaagtcagcgtggagatcgagtgggagctgcagaaggaaaacagcaagcgctggaacccggagatccagtacacttccaactattacaagcctaataatgttgaatttgctgttaatactgaaggtgtatatagtgaaccccgccccattggcaccagatacctgactcgtaatctg

SEQ ID NO: 637 - DNA, 2208 bp, Artificial Sequence
  Description of Artificial Sequence: Synthetic polynucleotide
atggctgccgatggttatcttccagattggctcgaggacaaccttagtgaaggaattcgcgagtggtgggctttgaaacctggagcccctcaacccaaggcaaatcaacaacatcaagacaacgctcgaggtcttgtgcttccgggttacaaataccttggacccggcaacggactcgacaagggggagccggtcaacgcagcagacgcggcggccctcgagcacaacaaggcctacgaccagcagctcaaggccggagacaacccgtacctcaagtgcaaccacgccgacgccgagttccaggagcggctcaaagaagatacgtcttttgggggcaacctcgggcgagcagtcttccaggccaaaaagaggcctcttgaacctcttggtctggttgaggaagcggctaagacggctcctggaaagaagaggcctgtagagcagtctcctcaggaaccggactcctccgcgggtattggcaaatcgggtgcacagcccgctaaaaagagactcaatttcggtcagactggcgacacagagtcagtcccagaccctcaaccaatcggagaacctcccgcagccccctcaggtgtgagatctcttacaatggcttcaggtggtggcgcaccagtggcagacaataacgaaggtgccgatggagtgggtagttcctcgggaaattggcattgcgattcccaatggctgggggacagagtcatcaccaccagcacccgaacctgggccctgcccacctacaacaatcacctctacaagcaaatctccaacagcacatctggaggatcttcaaatgacaacgcctacctcggctacagcaccccctgggggtattttgacttcaacagattccactgccacttctcaccacgtgactggcagcgactcatcaacaacaactggggattccggcctaagcgactcaacttcaagctcttcaacattcaggtcaaagaggttacggacaacaatggagtcaagaccatcgccaataaccttaccagcacggtccaggtcttcacggactcagactatcagctcccgtacgtgctcgggtcggctcacgagggctgcctcccgccgttcccagcggacgttttcatgattcctcagtacgggtatctgacgcttaatgatggaagccaggccgtgggtcgttcgtccttttactgcctggaatatttcccgtcgcaaatgctaagaacgggtaacaacttccagttcagctacgagtttgagaacgtacctttccatagcagctacgctcacagccaaagcctggaccgactaatgaatccactcatcgaccaatacttgtactatctctcaaagactattaacggttctggacagaatcaacaaacgctaaaattcagtgtggccggacccagcaacatggctgtccagggaagaaactacatacctggacccagctaccgacaacaacgtgtctcaaccactgtgactcaaaacaacaacagcgaatttgcttggcctggagcttcttcttgggctctcaatggacgtaatagcttgatgaatcctggacctactatggccagccacaaagaaggagaggaccgtttctttcctttgtctggatctttaatttttggcaaacaaggaactggaagagacaacgtggatgcggacaaagtcatgataaccaacgaagaagaaattaaaactactaacccggtagcaacggagtcctatggacaagtggccacaaaccaccagagtgcccaagcacaggcgcagaccggctgggttcaaaaccaaggaatacttccgggtatggtttggcaggacagagatgtgtacctgcaaggacccatttgggccaaaattcctcacacggacggcaactttcacccttctccgctgatgggagggtttggaatgaagcacccgcctcctcagatcctcatcaaaaacacacctgtacctgcggatcctccaacggccttcaacaaggacaagctgaactctttcatcacccagtattctactggccaagtcagcgtggagatcgagtgggagctgcagaaggaaaacagcaagcgctggaacccggagatccagtacacttccaactattacaagtctaataatgttgaatttgctgttaatactgaaggtgtatatagtgaaccccgccccattggcaccagatacctgactcgtaatctg

SEQ ID NO: 638 - DNA, 2208 bp, Artificial Sequence
  Description of Artificial Sequence: Synthetic polynucleotide
atggctgccgatggttatcttccagattggctcgaggacaaccttagtgaaggaattcgcgagtggtgggctttgaaacctggagcccctcaacccaaggcaaatcaacaacatcaagacaacgctcgaggtcttgtgcttccgggttacaaataccttggacccggcaacggactcgacaagggggagccggtcaacgcagcagacgcggcggccctcgtgcacgacaaggcctacgaccagcagctcaaggccggagacaacccgtacctcaagtgcaaccacgccgacgccgagttccaggagcggctcaaagaagatacgtcttttgggggcaacctcgggcgagcagtcttccaggccaaaaagaggcttcttgaacctcttggtctggttgaggaagcggctaagacggctcctggaaagaagaggcctgtagagcagtctcctcaggaaccggactcctccgcgggtattggcaaatcgggtgcacagcccgctaaaaagagactcaatttcggtcagactggcgacacagagtcagtcccagaccctcaaccaatcggagaacctcccgcagccccctcaggtgtgggatctcttacaatggcttcaggtggtggcgcaccagtggcagacaataacgaaggtgccgatggagtgggtagttcctcgggaaattggcattgcgattcccaatggctgggggacagagtcatcaccaccagcacccgaacctgggccctgcccacctacaacaatcacctctacaagcaaatctccaacagcacatctggaggatcttcaaatgacaacgcctacctcggctacagcaccccctgggggtattttgacttcaacagattccactgccacttctcaccacgtgactggcagcgactcatcaacaacaactggggattccggcctaagcgactcaacttcaagctcttcaacattcaggtcaaagaggttacggacaacaatggagtcaagaccatcgccaataaccttaccagcacggtccaggtcttcacggactcagactatcagctcccgtacgtgctcgggtcggctcacgagggctgcctcccgccgttcccagcggacgttttcacgattcctcagtacgggtatctgacgcttaatgatggaagccaggccgtgggtcgttcgtccttttactgcctggaatatttcccgtcgcaaatgctaagaacgggtaacaacttccagttcagctacgagtttgagaacgtacctttccatagcagctacgctcacagccaaagcctggaccgactaatgaatccactcatcgaccaatacttgtactatctctcaaagactattaacggttctggacagaatcaacaaacgctaaaattcagtgtggccggacccagcaacatggctgtccagggaagaaactacatacctggacccagctaccgacaacaacgtgtctcaaccactgtgactcaaaacaacaacagcgaatttgcttggcctggagcttcttcttgggctctcaatggacgtaatagcttgatgaatcctggacctgctatggccagccacaaagaaggagaggaccgtttctttcctttgtctggatctttaatttttggcaaacaaggaactggaagagacaacgtggatgcggacaaagtcatgataaccaacgaagaagaaattaaaactactaacccggtagcaacggagtcctatggacaagtggccacaaaccaccagagtgcccaagcacaggcgcagaccggctgggttcaaaaccaaggaatacttccgggtatggtttggcaggacagagatgtgtacctgcaaggacccatttgggccaaaattcctcacacggacggcaactttcacccttctccgctgatgggagggtttggaatgaagcacccgcctcctcagatcctcatcaaaaacacacctgtacctgcggatcctccaacggccttcaacaaggacaagctgaactctttcatcacccagtattctactggccaagtcagcgtggagatcgagtgggagctgcagaaggaaaacagcaagcgctggaacccggagatccagtacacttccaactattacaagtctaataatgttgaatttgctgttaatactgaaggtgtatatagtgaaccccgccccattgggccccgatacctgactcgtaatttt

SEQ ID NO: 639 - DNA, 2208 bp, Artificial Sequence
  Description of Artificial Sequence: Synthetic polynucleotide
atggctgccgatggttatcttccagattggctcgaggacaaccttagtgaaggaattcgcgagtggtgggctttgaaacctggagcccctcaacccaaggcaaatcaacaacatcaagacaacgctcgaggtcttgtgcttccgggttacaaataccttggacccggcaacggactcgacaagggggagccggtcaacgcagcagacgcggcggccctcgagcacaacaaggcctacgaccagcagctcaaggccggagacaacccgtacctcaagtgcaaccacgccgacgccgagttccaggagcggctcaaagaagatacgtcttttgggggcaacctcgggcgagcagtcttccaggccaaaaagaggcttcttgaacctcttggtctggttgaggaagcggctaagacggctcctggaaagaagaggcctgtagagcagtctcctcaggaaccggactcctccgcgggtattggcaaatcgggtgcacagcccgctaaaaagagactcaatttcggtcagactggcgacacagagtcagtcccagaccctcaaccaatcggagaacctcccgcagccccctcaggtgtgagatctcttacaatggcttcaggtggtggcgcaccagtggcagacaataacgaaggtgccgatggagtgggtagttcctcgggaaattggcattgcgattcccaatggctgggggacagagtcatcaccaccagcacccgaacctgggccctgcccacctacaacaatcacctctacaagcaaatctccaacagcacatctggaggatcttcaaatgacaacgcctacctcggctacagcaccccctgggggtattttgacttcaacagattccactgccacttctcaccacgtgactggcagcgactcatcaacaacaactggggattccggcctaagcgactcaacttcaagctcttcaacattcaggtcaaagaggttacggacaacaatggagtcaagaccatcgccaataaccttaccagcacggtccaggtcttcacggactcagactatcagctcccgtacgtgctcgggtcggctcacgagggctgcctcccgccgttcccagcggacgttttcatgattcctcagtacgggtatctgacgcttaatgatggaagccaggccgtgggtcgttcgtccttttactgcctggaatatttcccgtcgcaaatgctaagaacgggtaacaacttccagttcagctacgagtttgagaacgtacctttccatagcagctacgctcacagccaaagcctggaccgactaatgaatccactcatcgaccaatacttgtactatctctcaaagactattaacggttctggacagaatcaacaaacgctaaaattcagtgtggccggacccagcaacatggctgtccagggaagaaactacatacctggacccagctaccgacaacaacgtgtctcaaccactgtgactcaaaacaacaacagcgaatttgcttggcctggagcttcttcttgggctctcaatggacgtaatagcttgatgaatcctggacctgctatggccagccacaaagaaggagaggaccgtttctttcctttgtctggatctttaatttttggcaaacaaggaactggaagagacaacgtggatgcggacaaagtcatgataaccaacgaagaagaaattaaaactactaacccggtagcaacggagtcctatggacaagtggccacaaaccaccagagtgcccaagcacaggcgcagaccggctgggttcaaaaccaaggaatacttccgggtatggtttggcaggacagagatgtgtacctgcaaggacccatttgggccaaaattcctcacacggacggcaactttcacccttctccgctgatgggagggtttggaatgaagcacccgcctcctcagatcctcatcaaaaacacacctgtacctgcggatcctccaacggccttcaacaaggacaagctgaactctttcatcacccagtattctactggccaagtcagcgtggagatcgagtgggagctgcagaaggaaaacagcaagcgctggaacccggagatccagtacacttccaactattacaagtctaataatgttgaatttgctgttaatactgaaggtgtatatagtgaaccccgccccattggcaccagatacctgactcgtaatctg

SEQ ID NO: 640 - DNA, 2208 bp, Artificial Sequence
  Description of Artificial Sequence: Synthetic polynucleotide
atggctgccgatggttatcttccagattggctcgaggacaaccttagtgaaggaattcgcgagtggtgggctttgaaacctggagcccctcaacccaaggcaaatcaacaacatcaagacaacgctcgaggtcttgtgcttccgggttacaaataccttggacccggcaacggactcgacaagggggagccggtcaacgcagcagacgcggcggccctcgagcacgacaaggcctacgaccagcagctcaaggccggagacaacccgtacctcaagtgcaaccacgccgacgccgagttccaggagcggctcaaagaagatacgtcttttgggggcaacctcgggcgagcagtcttccaggccaaaaagaggcttcttgaacctcttggtctggttgaggaagcggctaagacggctcctggaaagaagaggcctgtagagcagtctcctcaggaaccggactcctccgcgggtattggcaaatcgggtgcacagcccgctaaaaagagactcaatttcggtcagactggcgacacagagtcagtcccagaccctcaaccaatcggagaacctcccgcagccccctcaggtgtgggatctcttacaatggcttcaggcggtggcgcaccagtggcagacaataacgaaggtgccgatggagtgggtagttcctcgggaaattggcattgcgattcccaatggctgggggacagagtcatcaccaccagcacccgaacctgggccctgcccacctacaacaatcacctctacaagcaaatctccaacagcacatctggaggatcttcaaatgacaacgcctacctcggctacagcaccccctgggggtattttgacttcaacagattccactgccacttctcaccacgtgactggcagcgactcatcaacaacaactggggattccggcctaagcgactcaacttcgagctcttcaacattcaggtcaaagaggttacggacaacaatggagtcaagaccatcgccaataaccttaccagcacggtccaggtcttcacggactcagactatcagctcccgtacgtgctcgggtcggctcacgagggctgcctcccgccgttcccagcggacgttttcatgattcctcagtacgggtatctgacgcttaatgatggaagccaggccgtgggtcgttcgtccttttactgcctggaatatttcccgtcgcaaatgctaagaacgggtaacaacttccagtccagctacgagtttgagaacgtacctttccatagcagctacgctcacagccaaagcctggaccgactaatgaatccactcatcgaccaatacttgtactatctctcaaagactattaacggttctggacagaatcaacaaacgctaaaattcagtgtggccggacccagcaacatggctgtccagggaagaaactacatacctggacccagctaccgacaacaacgtgcctcaaccactgtgactcaaaacaacaacagcgaatttgcttggcctggagcttcttcttgggctctcaatggacgtaatagcttgatgaatcctggacctgctatggccagccacaaagaaggggaggaccgtttctttcctttgtctggatctttaatttttggcaaacaaggaactggaagagacaacgtggatgcggacaaagtcatgataaccaacgaagaagaaattaaaactactaacccggtagcaacggagtcctatggacaagtggccacaaaccaccagagtgcccaagcacaggcgcagaccggctgggttcaaaaccaaggaatacttccgggtatggtttggcaggacagagatgtgtacctgcaaggacccatttgggccaaaattcctcacacggacggcaactttcacccttctccgctgatgggagggtttggaatgaagcacccgcctcctcagatcctcatcaaaaacacacctgtacctgcggatcctccaacggccttcaacaaggacaagctgaactctttcatcacccagtattctactggccaagtcagcgtggagatcgagtgggagctgcagaaggaaaacagcaagcgctggaacccggagatccagtacacttccaactattacaagtctaataatgttgaatttgctgttaatactgaaggtgtatatagtgaaccccgccccattggcaccagatacctgactcgtaatctg

SEQ ID NO: 641 - DNA, 2208 bp, Artificial Sequence
  Description of Artificial Sequence: Synthetic polynucleotide
atggctgccgatggttatcttccagattggctcgaggacaaccttagtgaaggaattcgcgagtggtgggctttgaaacctggagcccctcaacccaaggcaaatcaacaacatcaagacaacgctcgaggtcttgtgcttccgggttacaaataccttggacccggcaacggactcgacaagggggagccggtcaacgcagcagacgcggcggccctcgagcacgacaaggcctacgaccagcagctcaaggccggagacaacccgtacctcaagtgcaaccacgccgacgccgagttccaggagcggctcaaagaagatacgtcttttgggggcaacctcgggcgagcagtcttccaggccaaaaagaggcttcttgaacctcttggtctggttgaggaagcggctaagacggctcctggaaagaagaggcctgtagagcagtctcctcaggaaccggactcctccgcgggtattggcaaatcgggtgcacagcccgctaaaaagagactcaatttcggtcagactggcgacacagagtcagtcccagaccctcaaccaatcggagaacctcccgcagcccccccaggtgtgggatctcttacaatggcttcaggtggtggcgcaccagtggcggacaataacgaaggtgccgatggagtgggtagttcctcgggaaattggcattgcgattcccaatggctgggggacagagtcatcaccaccagcacccgaacctgggccctgcccacctacaacaatcacctctacaagcaaatctccaacagcacatctggaggatcttcaaatgacaacgcctacctcggctacagcaccccctgggggtattttgacttcaacagattccactgccacttctcaccacgtgactggcagcgactcatcaacaacaactggggattccggcctaagcgactcaacttcaagctcttcaacattcaggtcaaagaggttacggacaacaatggagtcaagaccatcgccaataaccttaccagcacggtccaggtcttcacggactcagactatcagctcccgtacgtgctcgggtcggctcacgagggctgcctcccgccgttcccagcggacgttttcatgattcctcagtacgggtatctgacgcttaatgatggaagccaggccgtgggtcgttcgtccttttactgcctggaatatttcccgtcgcaaatgctaagaacgggtaacaacttccagttcagctacgagtttgagaacgtacctttccatagcagctacgctcacagccaaagcctggaccgactaatgaatccactcatcgaccaatacttgtactatctctcaaagactattagcggttctggacagaatcaacaaacgctaaaattcagtgtggccggacccagcaacatggctgtccagggaagaaactacatacctggacccagctaccgacaacaacgtgtctcaaccactgtgactcaaaacaacagcagcgaatttgcttggcctggagcttcttcttgggctctcaatggacgtaatagcttgatgaatcctggacctgctatggccagccacaaagaaggagaggaccgtttctttcctttgtctggatctttaatttttggcaaacaaggaactggaagagacaacgtggatgcggacaaagtcatgataaccaacgaagaagaaattaaaactactaacccggtagcaacggagtcctatggacaagtggccacaaaccaccagagtgcccaagcacaggcgcagaccggctgggttcaaaaccaaggaatactttcgggtatggtttggcaggacagagatgtgtacctgcaaggacccatttgggccaaaattcctcacacggacggcaactttcacccttctccgctgatgggagggtttggaatgaagcacccgcctcctcagatcctcatcaaaaacacacctgtacctgcggatcctccaacggccttcaacaaggacaagctgaactctttcatcacccagtattctactggccaagtcagcgtggagatcgagtgggagctgcagaaggaaaacagcaagcgctggaacccggagatccagtacacttccaactattacaagtctaataatgttgaatttgctgttaatactgaaggtgtatatagtgaaccccgccccattggcaccagatacctgactcgtaatctg

SEQ ID NO: 642 - DNA, 2208 bp, Artificial Sequence
  Description of Artificial Sequence: Synthetic polynucleotide
atggctgccgatggttatcttccagattggctcgaggacaaccttagtgaaggaattcgcgagtggtgggctttgaaacctggagcccctcaacccaaggcaaatcaacaacatcaagacaacgctcgaggtcttgtgcttccgggttacaaataccttggacccggcaacggactcgacaagggggagccggtcaacgcagcagacgcggcggccctcgagcacgacaaggcctacgaccagcagctcaaggccggagacaacccgtacctcaagtgcaaccacgccgacgccgagttccaggagcggctcaaagaagatacgtcttttgggggcaacctcgggcgagcagtcttccaggccaaaaagaggcttcttgaacctcttggtctggttgaggaagcggctaagacggctcctggaaagaagaggcctgtagagcagtctcctcaggaaccggactcctccgcgggtattggcaaatcgggtgcacagcccgctaaaaagagactcaatttcggtcagactggcgacacagagtcagtcccagaccctcaaccaatcggagaacctcccgcagccccctcaggtgtgggatctcttacaatggcttcaggtggtggcgcaccagtggcagacaataacgaaggtgccgatggagtgggtagttcctcgggaaattggcattgcgattcccaatggctgggggacagagtcatcaccaccagcacccgaacctgggccctgcccacctacaacaatcacctctacaagcaaatctccaacagcacatctggaggatcttcaaatgacaacgcctacctcggctacagcaccccctgggggtattttgacttcaacagattccactgccacttctcaccacgtgactggcagcgactcatcaacaacaactggggattccggcctaagcgactcaacttcaagctcttcaacattcaggtcaaagaggttacggacaacaatggagtcaagaccatcgccaataaccttaccagcacggtccaggtcttcacggactcagactatcagctcccgtacgtgctcgggtcggctcacgagggctgcctcccgccgttcccagcggacgttttcatgattcctcagtacgggtatctgacgcttaatgatggaagccaggccgtgggtcgttcgtccttttactgcctggaatatttcccgtcgcaaatgctaagaacgggtaacaacttccagttcagctacgagtttgagaacgtacctttccatagcagctacgctcacagccaaagcctggaccgactaatgaatccactcatcgaccaatacttgtactatctctcaaagactattaacggttctggacagaatcaacaaacgctaaaattcagtgtggccggacccagcaacatggctgtccagggaagaaactacatacctggacccagctaccgacaacaacgtgtctcaaccactgtgactcaaaacaacaacagcgaatttgcttggcctggagcttcttcttgggctctcaatggacgtaatagcttgatgaatcctggacctgctatggccagccacaaagaaggagaggaccgtttctttcctttgtctggatctttaatttttggcaaacaaggaactggaagagacaacgtggatgcggacaaagtcatgataaccaacgaagaagaaattaaaactactaacccggtagcaacggagtcctatggacaagtggccacaaaccaccagagtgcccaagcacaggcgcagaccggctgggttcaaaaccaaggaatacttccgggtatggtttggcaggacagagatgtgtacctgcaaggacccatttgggccaaaattcctcacacggacggcaactttcacccttctccgctgatgggagggtttggaatgaagcacccgcctcctcagatcctcatcaaaaacacacctgtacctgcggatcctccaacggccttcaacaaggacaagctgaactctttcatcacccagtattctactggccaagtcagcgtggagatcgagtgggagctgcagaaggaaaacagcaagcgctggaacccggagatccagtacacttccaactattacaagtctaataatgttgaatttgctgttaatactgaaggtgtatatagtgaaccccgccccattggcaccagatacctgactcgtaatctg

SEQ ID NO: 643 - DNA, 2208 bp, Artificial Sequence; identical to SEQ ID NO: 642
  Description of Artificial Sequence: Synthetic polynucleotide

SEQ ID NO: 644 - DNA, 2208 bp, Artificial Sequence
  Description of Artificial Sequence: Synthetic polynucleotide
atggctgccgatggttatcttccagattggctcgaggacaaccttagtgaaggaattcgcgagtggtgggctttgaaacctggagcccctcaacccaaggcaaatcaacaacatcaagacaacgctcgaggtcttgtgcttccgggttacaaataccttggacccggcaacggactcgacaagggggagccggtcaacgcagcagacgcggcggccctcgagcacgacaaggcctacgaccagcagctcaaggccggagacaacccgtacctcaagtgcaaccacgccgacgccgagttccaggagcggctcaaagaagatacgtcttttgggggcaacctcgggcgagcagtcttccaggccaaaaagaggcttcttgaacctcttggtctggttgaggaagcggctaagacggctcctggaaagaagaggcctgtagagcagtctcctcaggaaccggactcctccgcgggtattggcaaatcgggtgcacagcccgctaaaaagagactcaatttcggtcagactggcgacacagagtcagtcccagaccctcaaccaatcggagaacctcccgcagccccctcaggtgtgggatctcttacaatggcttcaggtggtggcgcaccagtggcagacaataacgaaggtgccgatggagtgggtagttcctcgggaaattggcattgcgattcccaatggctgggggacagagtcatcaccaccagcacccgaacctgggccctgcccacctacaacaatcacctctacaagcaaatctccaacagcacatctggaggatcttcaaatgacaacgcctacctcgactacagcaccccctgggggtattttgacttcaacagattccactgccacttctcaccacgtgactggcagcggctcatcaacaacaactggggattccggcctaagcgactcaacttcaagctcttcaacattcaggtcaaagaggttacggacaacaatggagtcaagaccatcgccaataaccttaccagcacggtccaggtcttcacggactcagactatcagctcccgtacgtgctcgggtcggctcacgagggctgcctcccgccgttcccagcggacgttttcatgattcctcagtacgggtatctgacgcttaatgatggaagccaggccgtgggtcgttcgtccttttactgcctggaatatttcccgtcgcaaatgctaagaacgggtaacaacttccagttcagctacgagtttgagaacgtacctttccatagcagctacgctcacagccaaagcctggaccgactaatgaatccactcatcgaccaatacttgtactatctctcaaagactattaacggttctggacagaatcaacaaacgctaaaattcagtgtggccggacccagcaacatggctgtccagggaagaaactacatacctggacccagctaccgacaacaacgtgtctcaaccactgtgactcaaaacaacaacagcgaatttgcttggcctggagcttcttcttgggctctcaatggacgtaatagcttgatgaatcctggacctgctatggccagccacaaagaaggagaggaccgtttctttcctttgtctggatctttaatttttggcaaacaaggaactggaagagacaacgtggatgcggacaaagtcatgataaccaacgaagaagaaattaaaactactaacccggtagcaacggagtcctatggacaagtggccacaaaccaccagagtgcccaagcacaggcgcagaccggctgggttcaaaaccaaggaatacttccgggtatggtttggcagggcagagatgtgtacctgcaaggacccatttgggccaaaattcctcacacggacggcaactttcacccttctccgctgatgggagggtttggaatgaagcacccgcctcctcagatcctcatcaaaaacacacctgtacctgcggatcctccaacggccttcaacaaggacaagctgaactctttcatcacccagtattctactggccaagtcagcgtggagatcgagtgggagctgcagaaggaaaacagcaagcgctggaacccggagatccagtacacttccaactattacaagtctaataatgttgaatttgctgttaatactgaaggtgtatatagtgaaccccgccccattggcaccagatacctgactcgtaatctg

SEQ ID NO: 645 - DNA, 2208 bp, Artificial Sequence; identical to SEQ ID NO: 642
  Description of Artificial Sequence: Synthetic polynucleotide

SEQ ID NO: 646 - DNA, 2208 bp, Artificial Sequence
  Description of Artificial Sequence: Synthetic polynucleotide
atggctgccgatggttatcctccagattggctcgaggacaaccttagtgaaggaattcgcgagtggtgggctttgaaacctggagcccctcaacccaaggcaaatcaacaacatcaagacaacgctcgaggtcttgtgcttccgggttacaaataccttggacccggcaacggactcgacaagggggagccggtcaacgcagcagacgcggcggccctcgagcacgacaaggcctacgaccagcagctcaaggccggggacaacccgcacctcaagtacaaccacgccgacgccgagttccaggagcggctcaaagaagatacgtcttttgggggcaacctcgggcgagcagtcttccaggccaaaaagaggcttcttgaacctcttggtctggttgaggaagcggctaagacggctcctggaaagaagaggcccgtagagcagtctcctcaggaaccggactcctccgcgggtattggcaaatcgggtgcacagcccgctaagaagagactcaatttcggtcagactggcgacactgagtcagtcccagaccctcaaccaatcggagaacctcccgcagccccctcaggtgtgggatctcttacaatggcttcaggtggtggcgcaccagtggcagacaataacgaaggtgccgatggagtgggtagttcctcgggaaattggcattgcgattcccaatggctgggggacagagtcatcaccaccagcacccgaacctgggccctgcccacctacaacaatcacctctacaagcaaatctccaacagcacatctggaggatcttcaaatgacaacgcctacttcggctacagcaccccctgggggtattttgacttcaacagattccactgccacttctcaccacgtgactggcagcgactcatcaacaacaactggggattccggcctaagcgactcaacttcaagctcttcaacattcaggtcaaagaggttacggacaacaatggagtcaagaccatcgccaataaccttaccagcacggtccaggtcttcacggactcagactatcagctcccgtacgtgctcgggtcggctcacgagggctgcctcccgccgttcccagcggacgttttcatgattcctcagtacgggtatctgacgcttaatgatggaagccaggccgtgggtcgttcgtccttttactgcctggaatatttcccgtcgcaaatgctaagaacgggtaacaacttccagttcagctacgagtttgagaacgtacctttccatagcagctacgctcacagccaaagcctggaccgactaatgaatccactcatcgaccaatacttgtactatctctcaaagactattaacggttctggacagaatcaacaaacgctaaaattcagtgtggccggacccagcaacatggctgtccagggaagaaactacatacctggacccagctaccgacaacaacgtgtctcaaccactgtgactcaaaacaacaacagcgaatttgcttggcctggagcttcttcttgggctctcaatggacgtaatagcttgatgaatcctggacctgctatggccagccacaaagaaggagaggaccgtttctttcctttgtctggatctttaatttttggcaaacaaggaactggaagagacaacgtggatgcggacaaagtcatgataaccaacgaagaagaaattaaaactactaacccggtagcaacggagtcctatggacaagtggccacaaaccaccagagtgcccaagcacaggcgcagaccggctgggttcaaaaccaaggaatacttccgggtatggtttggcaggacagagatgtgtacctgcaaggacccatttgggccaaaattcctcacacggacggcaactttcacccttctccgctgatgggagggtttggagtgaagcacccgcctcctcagatcctcatcaaaaacacacctgtacctgcggatcctccaacggccttcaacaaggacaggctgaactctttcatcacccagtattctactggccaagtcagcgtggagatcgagtgggagctgcagaaggaaaacagcaagcgctggaacccggagatccagtacacttccaactattacaagtctaataatgttgaatttgctgttaatactgaaggtgtatatagtgaaccccgccccattggcaccagatacctgactcgtaatctg

SEQ ID NO: 647 - DNA, 2208 bp, Artificial Sequence
  Description of Artificial Sequence: Synthetic polynucleotide
atggctgccgatggttatcttccagattggctcgaggacaaccttagtgaaggaattcgcgagtggtgggctttgaaacctggagcccctcaacccaaggcaaatcaacaacatcaagacaacgctcgaggtcttgtgcttccgggttacaaataccttggacccggcaacggactcgacaagggggagccggtcaacgcagcagacgcggcggccctcgagcacgacaaggcctacgaccagcagctcaaggccggagacaacccgtacctcaagtacaaccacgccgacgccgagttccaggagcggctcaaagaagatacgtcttttgggggcaacctcgggcgagcagtcttccaggccaaaaagaggcttcttgaacctcttggtctggttgaggaagcggctaagacggctcctggaaagaagaggcctgtagagcagtctcctcaggaaccggactcctccgcgggtattggcaaatcgggtgcacagcccgctaaaaagagactcaatttcggtcagactggcgacacagagtcagtcccagaccctcaaccaatcggagaacctcccgcagccccctcaggtgtgggatctcttacaatggcttcaggtggtggcgcaccagtggcggacaataacgaaggtgccgatggagtgggtagttcctcgggaaattggcattgcgattcccaatggctgggggacagagtcatcaccaccagcacccgaacctgggccctgcccacctacaacaatcacctctacaagcaaatctccaacagcacatctggaggatcttcaaatgacaacgcctacttcggctacagcaccccctgggggtattttgacttcaacagattccactgccacttctcaccacgtgactggcagcgactcatcaacaacaactggggattccggcctaagcgactcaacttcaagctcttcaacattcaggtcaaagaggttacggacaacaatggagtcaagaccatcgccaataaccttaccagcacggtccaggtcttcacggactcagactatcagctcccgtacgtgctcgggtcggctcacgagggctgcctcccgccgttcccagcggacgttttcatgattcctcagtacgggtatctgacgcttaatgatggaagccaggccgtgggtcgttcgtccttttactgcctggaatatttcccgtcgcaaatgctaagaacgggtaacaacttccagttcagctacgagtttgagaacgtacctttccatagcagctacgctcacagccaaagcctggaccgactaatgaatccactcatcgaccaatacttgtactatctctcaaagactattaacggttctggacagaatcaacaaacgctaaaattcagtgtggccggacccagcaacatggctgtccagggaagaaactacatacctggacccagctaccgacaacaacgtgtctcaaccactgtgactcaaaacaacaacagcgaatttgcttggcctggagcttcttcttgggctctcaatggacgtaatagtttgatgaatcctggacctgctatggccagccacaaagaaggagaggaccgtttctttcctttgtctggatctttaatttttggcaaacaaggaactggaagagacaacgtggatgcggacaaagtcatgataaccaacgaagaagaaattaaaactactaacccggtagcaacggagtcctatggacaagtggccacaaaccaccagagtgcccaagcacaggcgcagaccggctgggttcaaaaccaaggaatacttccgggtatggtttggcaggacagagatgtgtacctgcaaggacccatttgggccaaaattcctcacacggacggcaactttcacccttctccgctgatgggagggtttggagtgaagcacccgcctcctcagatcctcatcaaaaacacacctgtacctgcggatcctccaacggccttcaacaaggacaagctgaactctttcatcacccagtattctactggccaagtcagcgtggagatcgagtgggagctgcagaaggaaaacagcaagcgctggaacccggagatccagtacacttccaactattacaagtctaataatgttgaatttgctgttaatactgaaggtgtatatagtgaaccccgccccattggcaccagatacctgactcgtaatctg

SEQ ID NO: 648 - DNA, 2208 bp, Artificial Sequence
  Description of Artificial Sequence: Synthetic polynucleotide
atggctgccgatggttatcttccagattggctcgaggacaaccttagtgaaggaattcgcgagtggtgggctttgaaacctggagcccctcaacccaaggcaaatcaacaacatcaagacaacgctcgaggtcttgtgcttccgggttacaaataccttggacccggcaacggactcgacaagggggagccggtcaacgcagcagacgcggcggccctcgagcacgacaaggcctacgaccagcagctcaaggccggagacaacccgtacctcaagtacaaccacgccgacgccgagttccaggagcggctcaaagaagatacgtcttttgggggcaacctcgggcgagcagtcttccaggccaaaaagaggcttcttgaacctcttggtctggttgaggaagcggctaagacggctcctggaaagaagaggcctgtagagcagtctcctcaggaaccggactcctccgcgggtattggcaaatcgggtgcacagcccgctaaaaagagactcaatttcggtcagactggcgacacagagtcagtcccagaccctcaaccaatcggagaacctcccgcagccccctcaggtgtgggatctcttacaatggcttcaggtggtggcgcaccagtggcagacaataacgaaggtgccgatggagtgggtagttcctcgggaaattggcattgcgattcccaatggctgggggacagagtcatcaccaccagcacccgaacctgggccctgcccacttacaacaatcacctctacaagcaaatctccaacagcacatctggaggatcttcaaatgacaacgcctacttcggctacagcaccccctgggggtattttgacttcaacagattccactgccacttctcaccacgtgactggcagcgactcaccaacaacaactggggattccggcctaagcgactcaacttcaagctcttcaacattcaggtcaaagaggttacggacaacaatggagtcaagaccatcgccaataaccttaccagcacggtccaggtcttcacggactcagactatcagctcccgtacgtgctcgggtcggctcacgagggctgcctcccgccgttcccagcggacgttttcatgattcctcagtacgggtatctgacgcttaatgatggaagccaggccgtgggtcgttcgtccttttactgcctggaatatatcccgtcgcaaatgctaagaacgggtaacaacttccagttcagctacgagtttgagaacgtacctttccatagcagctacgctcacagccaaagcctggaccgactaatgaatccactcatcgaccaatacttgtactatctctcaaagactattaacggttctggacagaatcaacaaacgctaaaattcagtgtggccggacccagcaacatggctgtccagggaagaaactacatacctggacccagctaccgacaacaacgtgtctcaaccactgtgactcaaaacaacaacagcgaatttgcttggcctggagcttcttcttgggctctcaatggacgtaatagcttgatgaatcctggacctgctatggccagccacaaagaaggagaggaccgtttctttcctttgtctggatctttaatttttggcaaacaaggaactggaagagacaacgtggatgcggacaaagtcatgataaccaacgaagaagaaattaaaactactaacccggtagcaacggagtcctatggacaagtggccacaaaccaccagagtgcccaagcacaggcgcagaccggctgggttcaaaaccaaggaatacttccgggtatggtttggcaggacagagatgtgtacctgcaaggacccatttgggccaaaattcctcacacggacggcaactttcacccttctccgctgatgggagggtttggagtgaagcacccgcctcctcagatcctcatcaaaaacacacctgtacctgcggatcctccaacggccttcaacaaggacaagctgaactctttcatcacccagtattctactggccaagtcagcgtggagatcgagtgggagctgcagaaggaaaacagcaagcgctggaacccggagatccagtacacttccaactattacaagtctaataatgttgaatttgctgttaatactgaaggtgtatatagtgaaccccgccccattggcaccagatacctgactcgtaatctg

SEQ ID NO: 649 - DNA, 2208 bp, Artificial Sequence
  Description of Artificial Sequence: Synthetic polynucleotide
atggctgccgatggttatcttccagattggctcgaggacaaccttagtgaaggaattcgcgagtggtgggctttgaaacctggagcccctcaacccaaggcaaatcaacaacatcaagacaacgctcgaggtcttgtgcttccgggttacaaataccttggacccggcaacggactcgacaagggggagccggtcaacgcagcagacgcggcggccctcgagcacgacaaggcctacgaccagcagctcaaggccggagacaacccgtacctcaagtacaaccacgccgacgccgagttccaggagcggctcaaagaagatacgtcttttgggggcaacctcgggcgagcagtcttccaggccaaaaagaggcttcttgaacctcttggtctggttgaggaagcggctaagacggctcctggaaagaagaggcctgtagagcagtctcctcaggaaccggactcctccgcgggtattggcaaatcgggtgcacagcccgctaaaaagagactcaatttcggtcagactggcgacacagagtcagtcccagaccctcaaccaatcggagaacctcccgcagccccctcaggtgtgggatctcttacaatggcttcaggtggtggcgcaccagtggcagacaataacgaaggtgccgatggagtgggtagttcctcgggaaattggcattgcgattcccaatggctgggggacagagtcatcaccaccagcacccgaacctgggccctgcccacctacaacaatcacctctacaagcaaatctccaacagcacatctggaggatcttcaaatgacaacgcctacttcggctacagcaccccctgggggtattttgacttcaacagattccactgccacttctcaccacgtgactggcagcgactcatcaacaacaactggggattccggcctaagcgactcaacttcaagctcttcaacattcaggtcaaagaggttacggacaacaatggagtcaagaccatcgccaataaccttaccagcacggtccaggtcttcacggactcagactatcagctcccgtacgtgctcgggtcggctcacgagggctgcctcccgccgttcccagcggacgttttcatgattcctcagtacgggtatctgacgcttaatgatggaagccaggccgtgggtcgttcgtccttttactgcctggaatatttcccgtcgcaaatgctaagaacgggtaacaacttccagtttagctacgagtttgagaacgtacctttccatagcagctacgctcacagccaaagcctggaccgactaatgaatccactcatcgaccaatacttgtactatctctcaaagactattaacggttctggacagaatcaacaaacgctaaaattcagtgtggccggacccagcaacatggctgtccagggaagaaactacatacctggacccagctaccgacaacaacgtgtctcaaccactgtgactcaaaacaacaacagcgaatttgcttggcctggagcttcttcttgggctctcaatggacgtaatagcttgatgaatcctggacctgctatggccagccacaaagaaggagaggaccgtttctttcctttgtctggatctttaatttctggcaaacaaggaactggaagagacaacgtggatgcgaacaaagtcatgataaccaacgaagaagaaattaaaactactaacccggtagcaacggagtcctatggacaagtggccacaaaccaccagagtgcccaagcacaggcgcagaccggctgggttcaaaaccaaggaatacttccgggtatggtttggcaggacagagatgtgtacctgcaaggacccatttgggccaaaattcctcacacggacggcaactttcacccttctccgctgatgggagggtttgaaatgaagcacccgcctcctcagatcctcatcaaaaacacacctgtacctgcggatcctccaacggccttcaacaaggacaagctgaactctttcatcacccagtattctactggccaagtcagcgtggagatcgagtgggagctgcagaaggaaaacagcaagcgctggaacccggagatccagtacacttccaactattacaagtctaataatgttgaatttgctgttaatactgaaggtgtatatagtgaaccccgccccattggcaccagatacctgactcgtaatctg

SEQ ID NO: 650 - DNA, 2208 bp, Artificial Sequence
  Description of Artificial Sequence: Synthetic polynucleotide
atggctgccgatggttatcttccagattggctcgaggacaaccttagtgaaggaattcgcgagtggtgggctttgaaacctggagcccctcaacccaaggcaaatcaacaacatcaagacaacgctcgaggtcttgtgcttccgggttacaaataccttggacccggcaacggactcgacaagggggagccggtcaacgcagcagacgcggcggccctcgagcacgacaaggcctacgaccagcagctcaaggccggagacaacccgtacctcaagtacaaccacgccgacgccgagttccaggagcggctcaaagaagatacgtcttttgggggcaacctcgggcgagcagtcttccaggccaaaaagaggcttcttgaacctcttggtctggttgaggaagcggctaagacggctcctggaaagaagaggcctgtagagcagtctcctcaggaaccggactcctccgcgggtattggcaaatcgggtgcacagcccgctaaaaagagactcaatttcggtcagactggcgacacagagtcagtcccagaccctcaaccaatcggagaacctcccgcagccccctcaggtgtgggatctcttacaatagcttcaggtggtggcgcaccagtggcagacaataacgaaggtgccgatggagtgggtagttcctcgggaaattggcattgcgattcccaatggctgggggacagagtcatcaccaccagcacccgaacctgggccctgcccacctacaacaatcacctctacaagcgaatctccaacagcacatctggaggatcttcaaatgacaacgcctacttcggctacagcaccccctgggggtattttgacttcaacagattccactgccacttctcaccacgtgactggcagcgactcatcaacaacaactggggattccggcctaagcgactcaacttcaagcttttcaacattcgggtcaaagaggttacggacaacaatggagtcaagaccatcaccaataaccttaccagcacggtccaggtcttcacggactcagactatcagctcccgtacgtgcttgggtcggctcacgagggctgcctcccgccgttcccagcggacgttttcatgattcctcagtacgggtatctgacgcttaatgatggaagccaggccgtgggtcgttcgtccttttactgcctggaatatttcccgtcgcaaatgctaagaacgggtaacaacttccagttcagctacgagtttgagaacgtacctttccatagcagctacgctcacagccaaagcctggaccgactaatgaatccactcatcgaccaatacttgtactatctctcaaagactattaacggttctggacagaatcaacaaacgctaaaattcagtgtggccggacccagcaacatggctgtccagggaagaaactacatacctggacccagctaccgacaacaacgtgtctcaaccactgtgactcgaaacaacaacagcgaatttgcttggcctggagcttcttcttgggctctcaatggacgtaatagcttgatgaatcctggacctgctatggccagccacaaagaaggagaggaccgtttctttcctttgtctggatctttaatttttggcaaacaaggaactggaagagacaacgtggatgcggacaaagtcatgataaccaacgaagaagaaattaaaactactaacccggtagcaacggagtcctatggacaagtggccacaaaccaccagagtgcccaagcacaggcgcagaccggctgggttcaaaaccaaggaatacttccgggtatggtttggcaggacagagatgtgtacctgcaaggacccatttgggccaaaattcctcacacggacggcaactttcacccttctccgctgatgggagggtttggagtgaagcacccgcctcctcagatcctcatcaaaaacacacctgtacctgcggatcctccaacggccttcaacaaggacaagctgaactctttcatcacccagtattctactggccaagtcagcgtggagatcgagtgggagctgcagaaggaaaacagcaagcgctggaacccggagatccagtacacttccaactattacaagtctaataatgttgaatttgctgttaatactgaaggtgtatatagtgaaccccgccccattggcaccagatacctgactcgtaatctg

SEQ ID NO: 651 - DNA, 2208 bp, Artificial Sequence
  Description of Artificial Sequence: Synthetic polynucleotide
atggctgccgatggttatcttccagattggctcgaggacaaccttagtgaaggaattcgcgagtggtgggctttgaaacctggagcccctcaacccaaggcaaatcaacaacatcaagacaacgctcgaggtcttgtgcttccgggttacaaataccttggacccggcaacggactcgacaagggggagccggtcaacgcagcagacgcggcggccctcgagcacgacaaggcctacgaccagcagctcaaggccggagacaacccgtacctcaagtacaaccacgccgacgccgagttccaggagcggctcaaagaagatacgtcttttgggggcaacctcgggcgagcagtcttccaggccaaaaagaggcttcttgaacctcttggtctggttgaggaagcggctaagacggctcctggaaagaagaggcctgtagagcagtctcctcaggaaccggactcctccgcgggtattggcaaatcgggcgcacagcccgctaaaaagagactcaatttcggtcagactggcgacacagagccagtcccagaccctcaaccaatcggagaacctcccgcagccccctcaggtgtgggatctcttacaatggcttcaggtggtggcgcaccagtggcagacaataacgaaggtgccgatggagtgggtagttcctcgggaaattggcattgcgattcccaatggctgggggacagagtcatcaccaccagcacccgaacctgggccctgcccacctacaacaatcacctctacaagcaaatctccaacagcacatctggaggatcttcaaatgacaacgcctacttcggctacagcaccccctgggggtattttgacttcaacagattccactgccacttctcaccacgtgactggcagcgactcatcaacaacaactggggattccggcctaagcgactcaacttcaagctcttcaacattcaggtcaaagaggttacggacaacaatggagtcaagaccatcgccaataaccttaccagcacggtccaggtcttcacggactcagactatcagctcccgtacgtgctcgggtcggctcacgagggctgcctcccgccgttcccagcgggcgttttcatgattcctcagtacgggtatctgacgcttaatgatggaagccaggccgtgggtcgttcgtccttttactgcctggaatatttcccgtcgcaaatgctaagaacgggtaacaacttccagttcagctacgagtttgagaacgtacctttccatagcagctacgctcacagccaaagcctggaccgactaatgaatccactcatcgaccaatacttgtactatctctcaaagactattaacggttctggacagaatcaacaaacgctaaaattcagtgtggccggacccagcaacatggctgtccagggaagaaactacatacctggacccagctaccgacaacaacgtgtctcaaccactgcgactcaaaacaacaacagcgaatttgcttggcctggagcttcttcttgggctctcaatggacgtaatagcttgatgaatcctggacctgctatggccagccacaaagaaggagaggaccgtttctttcctttgtctggatctttaatttttggcaaacaaggaactggaagagacaacgtggatgcggacaaagtcatgataaccaacgaagaagaaattaaaactactaacccggtagcaacggagtcctatggacaagtggccacaaaccaccagagtgcccaagcacaggcgcagaccggctgggttcaaaaccaaggaatacttccgggtatggtttggcaggacagagatgtgtacctgcaaggacccatttgggccaaaattcctcacacggacggcaactttcacccttctccgctgatgggagggtttggaatgaagcacccgcctcctcagatcctcatcaaaaacacacctgtacctgcggatcctccaacggccttcaacaaggacaagctgaactctttcatcacccagtattctactggccaagtcagcgtggagatcgagtgggagctgcagaaggaaaacagcaagcgctggaacccggagatccagtacacttccaactattacaagtctaataatgttgaatttgctgttaatactgaaggtgtatatagtgaaccccgccccattggcaccagatacctgactcgtaatctg

SEQ ID NO: 652 - DNA, 2208 bp, Artificial Sequence
  Description of Artificial Sequence: Synthetic polynucleotide
atggctgccgatggttatcttccagattggctcgaggacaaccttagtgaaggaattcgcgagtggtgggctttgaaacctggagcccctcaacccaaggcaaatcaacaacatcaagacaacgctcgaggtcttgtgcttccgggttacaaataccttggacccggcaacggactcgacaagggggagccggtcaacgcagcagacgcggcggccctcgagcacgacaaggcctacgaccagcagctcaaggccggagacaacccgtacctcaagtacaaccacgccgacgccgggttccaggagcggctcaaagaagatacgtcttttgggggcaacctcgggcgagcagtcttccaggccaaaaagaggcttcttgaacctcttggtctggttgaggaagcggctaagacggctcctggaaagaagaggcctgtagagcagtctcctcaggaaccggactcctccgcgggtattggcaaatcgggtgcacagcccgctaaaaagagactcaatttcggtcagactggcgacacagagtcagtcccagtccctcaaccaatcggagaacctcccgcagccccctcaggtgtgggatctcttacaatggcttcaggtggtggcgcaccagtggcagacaataacgaaggtgccgatggagtgggtagttcctcgggaaattggcattgcgattcccaatggctgggggacagagtcatcaccaccagcacccgaacctgggccctgcccacctacaacaatcacctctacaagcaaatctccaacagcacatctggaggatcttcaaatgacaacgcctacttcggctacagcaccccctgggggtattttgacttcaacagattccactgccacttctcaccacgtgactggcagcgactcatcaacaacaactggggattccggcctaagcgactcaacttcaagctcttcaacattcaggtcaaagaggttacggacaacaatggagtcaagaccatcgccaataaccttaccagcacggtccaggtcttcacggactcagactatcagctcccgtacgtgctcgggtcggctcacgagggctgcctcccgccgttcccagcggacgttttcatgattcctcagtacgggtatctgacgcttaatgatggaagccaggccgtgggtcgttcgtccttttactgcctggaatatttcccgtcgcaaatgctaagaacgggtaacaacttccagttcagctacgagtttgagaacgtacctttccatagcagctacgctcacagccaaagcctggaccgactaatgaatccactcatcgaccaatacttgtactatctctcaaagactattaacggttctggacagaatcaacaaacgctaaaattcagtgtggccggacccagcaacatggctgtccagggaagaaactacatacctggacccagctaccgacaacaacgtgtctcaaccactgtgactcaaaacaacaacagcgaatttgcttggcctggagcttcttcttgggctctcaatggacgtaatagcttgatgaatcctggacctgctatggccagccacaaagaaggagaggaccgtttctttcctttgtctggatctttaatttttggcaaacaaggagctggaagagacaacgtggatgcggacaaagtcatgataaccaacgaagaagaaattaaaactactaacccggtagcaacggagtcctatggacaagtggccacaaaccaccagagtgcccaagcacaggcgcagaccggctgggttcaaaaccaaggaatacttccgggtatggtttggcaggacagagatgtgtacctgcaaggacccatttgggccaaaattcctcacacggacggcaactttcacccttctccgctgatgggagggtttggaatgaagcacccgcctcctcagatcctcatcaaaaacacacctgtacctgcggatcctccaacggccttcaacaaggacaagctgaactctttcatcacccagtattctactggccaagtcagcgtggagatcgagtgggagctgcagaaggaaaacagcaagcgctggaacccggagatccagtacacttccaactattacaagtctaataatgttgaatttgctgttaatactgaaggtgtatatagtgaaccccgccccattggcaccagatacctgactcgtaatctg

SEQ ID NO: 653 - DNA, 2208 bp, Artificial Sequence
  Description of Artificial Sequence: Synthetic polynucleotide
  modified_base (377)..(377): a, c, g, or t
atggctgccgatggttatcttccagattggctcgaggacaaccttagtgaaggaattcgcgagaggtgggctttgaaacctggagcccctcaacccaaggcaaatcaacaacatcaagacaacgctcgaggtcttgtgcttccgggttacaaataccttggacccggcaacggactcgacaagggggagccggtcaacgcagcagacgcggcggccctcgagcacgacaaggcctacgaccagcagctcaaggccggagacaacccgtacctcaagtacaaccacgccgacgccgagttccaggagcggctcaaagaagatacgtcttttgggggcaacctcgggcgagcagtcttccaggccaaaaagaggcttcntgaacctcttggtctggttgaggaagcggctaagacggctcctggaaagaagaggcctgtagagcagtctcctcaggaaccggactcctccgcgggtattggcaaatcgggtgcacagcccgctaaaaagagactcaatttcggtcagactggcgacacagagtcagtcccagaccctcaaccaatcggagaacctcccgcagccccctcaggtgtgggatctcttacaatggcttcaggtggtggcgcaccagtggcagacaataacgaaggtgccgatggagtgggtagttcctcggggaattggcattgcgattcccaatggctgggggacagagtcatcaccaccagcacccgaacctgggccctgcccacctacaacaatcacctctacaagcaaatctccaacagcacatctggaggatcttcaaatgacaacgcctacttcggctacagcaccccctgggggtattttgacttcaacagattccactgccacttctcaccacgtgactggcagcgactcatcaacaacaactggggattccggcctaagcgactcaacttcaagctcttcaacattcaggtcaaagaggttacggacaacaatggagtcaagaccatcgccaataaccttaccagcacggtccaggtcttcacggactcagactatcagctcccgtacgtgctcgggtcggctcacgagggctgcctcccgccgttcccagcggacgttttcatgattcctcagtacgggtatctgacgcttaatgatggaagccaggccgtgggtcgttcgtccttttactgcctggaatatttcccgtcgcaaatgctaagaacgggtaacaacttccagttcagctacgagtttgagaacgtacctttccatagcagctacgctcacagccaaagcccggaccgactaatgaatccactcatcgaccaatacttgtactatctctcaaagactattaacggttctggacagaatcaacaaacgctaaaattcagtgtggccggacccagcaacatggctgtccagggaagaaactacatacctggacccagctaccgacaacaacgtgtctcaaccactgtgactcaaaacaacaacagcgaatttgcttggcctggagcttcttcttgggctctcaatggacgtaatagcttgatgaatcctggacctgctatggccagccacaaagaaggagaggaccgtttctttcctttgtctggatctttaatttttggcaaacaaggaactggaagagacaacgtggatgcggacaaagtcatgataaccaacgaagaagaaattaaaactactaacccggtagcaacggagtcctatggacaagtggccacaaaccaccagagtgcccaagcacaggcgcagaccggctgggttcaaaaccaaggaatacttccgggtatggtttggcaggacagagatgtgtacctgcaaggacccatttgggccaaaattcctcacacggacggcaactttcacccttctccgctgatgggagggtttggagtgaagcacccgcctcctcagatcctcatcaaaaacacacctgtacctgcggatcctccaacggccttcaacaaggacaagctgaactctttcatcacccagtattctactggccaagtcagcgtggagatcgagtgggagctgcagaaggaaaacagcaagcgctggaacccggagatccagtacacttccaactattacaagtctaataatgttgaatttgctgttaatactgaaggtgtatatagtgaaccccgccccattggcaccagatacctgactcgtaatctg

SEQ ID NO: 654 - DNA, 2208 bp, Artificial Sequence
  Description of Artificial Sequence: Synthetic polynucleotide
atggctgccgatggttatcttccagattggctcgaggacaaccttagtgaaggaattcgcgagtggtgggctttgaaacctggagcccctcaacccaaggcaaatcaacaacatcaagacaacgctcgaggtcttgtgcttccgggttacaaataccttggacccggcaacggactcgacaagggggagccggtcaacgcagcagacgcggcggccctcgagcacgacaaggcctacgaccagcagctcaaggccggagacaacccgtacctcaagtacaaccacgccgacgccgagttccaggagcggctcaaagaagatacgtcttttgggggcaacctcgggcgagcagtcttccaggccaaaaagaggcttcttgaacctcttggtctggttgaggaagcggctaagacggctcctggaaagaagaggcctgtagagcagtctcctcaggaaccggactcctccgcgggtattggcaaatcgggtgcacagcccgctaaaaagagactcaatttcggtcagactggcgacacagagtcagtcccagaccctcaaccaatcggagaacctcccgcagccccctcaggtgtgggatctcttacaatggcttcaggtggtggcgcaccagtggcagacaataacgaaggtgccgatggagtgggtagttcctcgggaaattggcattgcgattcccaatggctgggggacagagtcatcaccaccagcacccgaacctgggccctgcccacctacaacaatcacctctacaagcaaatctccaacagcacatctggaggatcttcaaatgacaacgcctacctcggctacagcaccccctgggggtattttgacttcaacagattccactgccacttctcaccacgtgactggcagcgactcatcaacaacaactggggattccggcctaagcgactcaacttcaagctcttcaacattcaggtcaaagaggttacggacaacaatggagtcaagaccatcgccaataaccttaccagcacggtccaggtcttcacggactcagactatcagctcccgtacgtgctcgggtcggctcacgagggctgcctcccgccgttcccagcggacgttttcatgattcctcagtacgggtatctgacgcttaatgatggaagccaggccgtgggtcgttcgtccttttactgcctggaatatttcccgtcgcaaatgctaagaacgggtaacaacttccagttcagctacgagtttgagaacgtacctttccatagcagctacgctcacagccaaagcctggaccgactaatgaatccactcatcgaccaatacttgtactatctctcaaagactattaacggttctggacagaatcaacaaacgctaaaattcagtgtggccggacccagcaacatggctgtccagggaagaaactacatacctggacccagctaccgacaacaacgtgtctcaaccactgtgactcaaaacaacaacagcgaatttgcttggcctggagcttcttcttgggctctcaatggacgtaatagcttgatgaatcctggacctgctatggccagccacaaagaaggagaggaccgtttctttcctttgtctggatctttaatttttggcaaacaaggaactggaagagacaacgtggatgcggacaaagtcatgataaccaacgaagaagaaattaaaactactaacccggtagcaacggagtcctatggacaagtggccacaaaccaccagagtgcccaagcacaggcgcagaccggctgggttcaaaaccaaggaatacttccgggtatggtttggcaggacagagatgtgtacctgcaaggacccatttgggccaaaattcctcacacggacggcaactttcacccttctccgctgatgggagggtttggaatgaagcacccgcctcctcagatcctcatcaaaaacacacctgtacctgcggatcctccaacggccttcaacaaggacaagctgaactctttcatcacccagtattctactggccaagtcagcgtggagatcgagtgggagctgcagaaggaaaacagcaagcgctggaacccggagatccagtacacttccaactattacaagtctaataatgttgaatttgctgttaatactgaaggtgtatatagtgaaccccgccccattggcaccagatacctgactcgtaatctg

SEQ ID NO: 655 - DNA, 2208 bp, Artificial Sequence
  Description of Artificial Sequence: Synthetic polynucleotide
atggctgccgatggttatcttccagattggctcgaggacaaccttagtgaaggaattcgcgagtggtgggctttgaaacctggagcccctcaacccaaggcaaatcaacaacatcaagacaacgctcgaggtcttgtgcttccgggttacaaataccttggacccggcaacggactcgacaagggggagccggtcaacgcagcagacgcggcggccctcgagcacgacaaggcctacgaccagcagctcaaggccggagacaacccgtacctcaagtacaaccacgccgacgccgagttccaggagcggctcaaagaagatacgtcttttgggggcaacctcgggcgagcagtcttccaggccaaaaagaggcttcttgaacctcttggtctggttgaggaagcggctaagacggctcctggaaagaagaggcctgtagagcagtctcctcaggaaccggactcctccgcgggtattggcaaatcgggtgcacagcccgctaaaaagagactcaatttcggtcagactggcgacacagagtcagtcccagaccctcaaccaatcggagaacctcccgcagccccctcaggtgtgggatctcttacaatggcttcaggtggtggcgcaccagtggcagacaataacgaaggtgccgatggagtgggtagttcctcgggaaattggcattgcgattcccaatggctgggggacagagtcatcaccaccagcacccgaacctgggccctgcccacctacaacaatcacctctacaagcaaatctccaacagcacatctggaggatcttcaaatgacaacgcctacttcggctacagcaccccctgggggtattttgacttcaacagattccactgccacttctcaccacgtgactggcagcgactcatcaacaacaactggggattccggcctaagcgactcaacttcaagctcttcaacattcaggtcaaagaggttacggacaacaatggagtcaagaccatcgccaataaccttaccagcacggtccaggtcttcacggactcagactatcagctcccgtacgtgctcgggtcggctcacgagggctgcctcccgccgttcccagcggacgttttcatgattcctcagtacgggtatctgacgcttaatgatggaagccaggccgtgggtcgttcgtccttttactgcctggaatatttcccgtcgcaaatgctaagaacgggtaacaacttccagttcagctacgagtttgagaacgtacctttccatagcagctacgctcacagccagagcctggaccgactaatgaatccactcatcgaccaatacttgtactatctctcaaagactattaacggttctggacagaatcaacaaacgctaaaattcagtgtggccggacccagcaacatggctgtccagggaagaaactacatacctggacccagctaccgacaacaacgtgtctcaaccactgtgactcaaaacaacaacagcgaatttgcttggcctggagcttcttcttgggctctcaatggacgtaatagcttgatgaatcctggacctgctatggccagccacaaagaaggagaggaccgtttctttcctttgtctggatctttaatttttggcaaacaaggaactggaagagacaacgtggatgcggacaaagtcatgataaccaacgaagaagaaattaaaactactaacccggtagcaacggagtcctatggacaagtggccacaaaccaccagagtgcccaagcacaggcgcagaccggctgggttcaaaaccaaggaatacttccgggtatggtttggcaggacagagatgtgtacctgcaaggacccatttgggccaaaattcctcacacggacggcaactttcacccttctccgctgatgggagggtttggaatgaagcacccgcctcctcagatcctcatcaaaaacacacctgtacctgcggatcctccaacggccttcaacaaggacaagctggactctttcatcacccagtattctactggccaagtcagcgtggagatcgagtgggagctgcagaaggaaaacagcaagcgctggaacccggtgatccagtacacttccaactattacaagtctaataatgttgaatttgctgttaatactgaaggtgtatatagtgaaccccgccccattggcaccagatacctgactcgtaatctg

SEQ ID NO: 656 - DNA, 2208 bp, Artificial Sequence
  Description of Artificial Sequence: Synthetic polynucleotide
atggctgccgatggttatcttccagattggctcgaggacaacctctctgagggcattcgcgagtggtgggacttgaaacctggagccccgaagcccaaagccaaccagcaaaagcaggacgacggccggggtctggtgcttcctggctacaagtacctcggacccttcaacggactcgacaagggggagcccgtcaacgcggcggacgcagcggccctcgagcacgacaaggcctacgaccagcagctcaaagcgggtgacaatccgtacctgcggtataaccacgccgacgccgagtttcaggagcgtctgcaagaagatacgtcttttgggggcaacctcgggcgagcagtcttccaggccaagaagcgggttctcgaacctctcggtctggttgaggaaggcgctaagacggctcctggaaagaaacgtccggtagagcagtcgccacaagagccagactcctcctcgggcatcggcaagacaggccagcagcccgctaaaaagagactcaattttggtcagactggcgactcagagtcagtccccgatccacaacctctcggagaacctccagcaacccccgctgctgtggggcctactacaatggcttcaggcggtggcgcaccaatggcagacaataacgaaggcgtcgacggagtgggtaatgcctcaggaaattggcattgcgattccacatggctgggcgacagagtcatcaccaccagcacccgcacctgggccttgcccacctacaataaccacctctacaagcaaatctccagtgcttcaacgggggccagcaacgacaaccactacttcggctacagcaccccctgggggtattttgatttcaacagattccactgccacttttcaccacgtgactggcagcgactcatcaacaacaattggggattccggcccaagagactcaacttcaaactcttcaacatccaagtcaaggaggtcacgacgaatgatggcgttacaaccatcgctaataaccttaccagcacggttcaagtcttctcggactcggagtaccagcttccgtacgtcctcggctctgcgcaccagggctgcctccctccgttcccggcggacgtgttcatgattccgcaatacggctacctgacgctcaacaatggcagccaagccgtgggacgttcatccttttactgcctggaatatttcccttctcagatgctgagaacgggcaacaactttaccttcagctacacctttgaggaagtgcctttccacagcagctacgcgcacagccagagcctggaccggctgatgaatcctctcatcgaccaatacctgtattacctgaacagaactcaaaatcagtccggaagtgcccaaaacaaggacttgctgtttagccgtgggtctccagctggcatgtctgttcagcccaaaaactggctacctggaccctgttatcggcagcagcgcgtttctaaaacaaaaacagacaacaacaacagcaattttacctggactggtgcttcaaaatataacctcaatgggcgtgaatccatcatcaaccctggcactgctatggcctcacacaaagacgacgaagacaagttctttcccatgagcggtgtcatgatttttggaaaagagagcgccggagcttcaaacactgcattggacaatgtcatgattacagacgaagaggaaattaaagccactaaccctgtggccaccgaaagatttgggaccgtggcagtcaatttccagagcagcagcacagaccctgcgaccggagatgtgcatgctatgggagcattacctggcatggtgtggcaagatagagacgtgtacctgcagggtcccatttgggccaaaattcctcacacagatggacactttcacccgtctcctcttatgggcggctttggactcaagaacccgcctcctcagatcctcatcaaaaacacgcctgttcctgcgaatcctccggcggagttttcagccacaaagcttgcttcattcatcacccaatactccacaggacaagtgagtgtggaaattgaatgggagctgcagaaagaaaacagcaagcgctggaatcccgaagtgcagtacacatccaattatgcaaaatctgccaacgttgattttactgtggacaacaatggactttatactgagcctcgccccattggcacccgttaccttacccgtcccctg

SEQ ID NO: 657 - DNA, 2208 bp, Artificial Sequence
  Description of Artificial Sequence: Synthetic polynucleotide
atggctgccgatggttatcttccagattggctcgaggacaacctctctgagggcattcgcgagtggtgggacttgaaacctggagccccgaagcccaaagccaaccagcaaaagcaggacgacggccggggtctggtgcttcctggctacaagtacctcggacccttcaacggactcgacaagggggagcccgtcaacgcggcggacgcagcggccctcgagcacgacaaggcctacgaccagcagctcaaagcgggtgacaatccgtacctgcggtataaccacgccgacgccgagtttcaggagcgtctgcaagaagatacgtcttttgggggcaacctcgggcgagcagtcttccaggccaagaagcgggttctcgaacctctcggtctggttgaggaaggcgctaagacggctcctggaaagagacgtccggtagagcagtcgccacaagagccagactcctcctcgggcatcggcaagacaggccagcagcccgctaaaaagagactcaattttggtcagactggcgactcagagtcagtccccgatccacaacctctcggagaacctccagcaacccccgctgctgtgggacctactacaatggcttcaggcggtggcgcaccaatggcagacaataacgaaggcgccgacggagtgggtaatgcctcaggaaattggcattgcgattccacatggctgggcgacagagtcatcaccaccagcacccgcacctgggccttgcccacctacaataaccacctctacaagcaaatctccagtgcttcaacgggggccagcaacgacaaccactacttcggctacagcaccccctgggggtattttgatttcaacagattccactgccacttttcaccacgtgactggcagcgactcatcaacaacaattggggattccggcccaagagactcaacttcaaactcttcaacatccaagtcaaggaggtcacgacgaatgatggcgtcacaaccatcgctaataaccttaccagcacggttcaagtcttctcggactcggagtaccagcttccgtacgtcctcggctctgcgcaccagggctgcctccctccgttcccggcggacgtgttcatgattccgcaatacggctacctgacgctcaacaatggcagccaagccgtgggacgttcatccttttactgcctggaatatttcccttctcagatgctgagaacgggcaacaactttaccttcagctacacctttgaggaagtgcctttccacagcagctacgcgcacagccagagcctggaccggctgatgaatcctctcatcgaccaatacctgtattacctgaacagaactcaaaatcagtccggaagtgcccaaaacaaggacttgctgtttagccgtgggtctccagctggcatgtctgttcagcccaaaaactggctacctggaccctgttatcggcagcagcgcgtttctaaaacaaaaacagacaacaacaacagcaattttacctggactggtgcttcaaaatataacctcaatgggcgtgaatccatcatcaaccctggcactgctatggcctcacacaaagacgacgaagacaagttctttcccatgagcggtgtcatgatttttggaaaagagagcgccggagcttcaaacactgcattggacaatgtcatgattacagacgaagaggaaattaaagccactaaccctgtggccaccgaaagatttgggaccgtggcagtcaatttccagagcagcagcacagaccctgcgaccggagatgtgcatgctatgggagcattacctggcatggtgtggcaagatagagacgtgtacctgcagggtcccatttgggccaaaattcctcacacagatggacactttcacccgtctcctcttatgggcggctttggactcaagaacccgcctcctcagatcctcatcaaaaacacgcctgttcctgcgaatcctccggcggagttttcagctacaaagtttgcttcgttcatcacccaatactccacaggacaagtgagtgtggaaattgaatgggagctgcagaaagaaaacagcaagcgctggaatcccgaagtgcagtacacatccaattatgcaaaatctgccaacgttgattttactgtggacaacaatggactttatactgagcctcgccccattggcacccgttaccttacccgtcccctg

SEQ ID NO: 658 - DNA, 2208 bp, Artificial Sequence
  Description of Artificial Sequence: Synthetic polynucleotide
atggctgccgatggttatcttccagattggctcgaggacaacctctctgagggcattcgcgagtggtgggacttgaaacctggagccccgaagcccaaagccaaccagcaaaagcaggacgacggccggggtctggtgcttcctggctacaagtacctcggacccttcaacggactcgacaagggggagcccgtcaacgcggcggacgcagcggccctcgagcacgacaaggcctacgaccagcagctcaaagcgggtgacaatccgtacccgcggtataaccacgccgacgccgagtttcaggagcgtctgcaagaagatacgtcttttgggggcaacctcgggcgagcagtcttccaggccaagaagcgggttctcgaacctctcggtctggttggggaaggcgctaagacggctcctggaaagaaacgtccggtagagcagtcgccacaagagccagactcctcctcgggcatcggcaagacaggccagcagcccgctaaaaagagactcaattttggtcagactggcgactcagagtcagtccccgatccacaacctctcggagaacctccagcaacccccgctgctgtgggacctactacaatggcttcaggcggtggcgcaccaatggcagacaataacgaaggcgccgacggagtgggtaatgcctcaggaaattggcattgcgattccacatggctgggcgacagagtcatcaccaccagcacccgcacctgggccttgcccacctacaataaccacctctacaagcaaatctccagtgcttcaacgggggccagcaacgacaaccactacttcggctacagcaccccctgggggtattttgatttcaacagattccactgccacttttcaccacgtgactggcagcgactcatcaacaacaattggggattccggcccaagagactcaacttcaaactcttcaacatccaagtcaaggaggtcacgacgaatgatggcgtcacaaccatcgctaataaccttaccagcacggttcaagtcttctcggactcggagtaccagcttccgtacgtcctcggctctgcgcaccagggctgcctccctccgttcccggcggacgtgttcatgattccgcaatacggctacctgacgctcaacaatggcagccaagccgtgggacgttcatccttttactgcctggaatatttcccttctcagatgctgagaacgggcaacaactttaccttcagctacacctttgaggaagtgcctttccacagcagctacgcgcacagccagagcctggaccggctgatgaatcctcccatcgaccaatacctgtattacctgaacagaactcaaaatcagtccggaagtgcccaaaacaaggacttgctgtttagccgtgggtctccagctggcatgtctgttcagcccaaaaactggctacctggaccctgttatcggcagcagcgcgtttctaaaacaaaaacagacaacaacaacagcaattttacctggactggtgcttcaaaatataacctcaatgggcgtgaatccatcatcaaccctggcactgctatggcctcacacaaagacgacgaagacaagttctttcccatgagcggtgtcatgatttttggaaaagagagcgccggagcttcaaacactgcattggacaatgtcatgattacagacgaagaggaaattaaagccactaaccctgtggccaccgaaagatttgggaccgtggcagtcaatttccagagcagcagcacagaccctgcgaccggagatgtgcatgctatgggagcattacctggcatggtgtggcaagatagagacgtgtacctgcagggtcccatttgggccaaaattcctcacacagatggacactttcacccgtctcctcttatgggcggctttggactcaagaacccgcctcctcagatcctcatcaaaaacacgcctgttcctgcgaatcctccggcggagttttcagctacaaagtttgcttcattcatcacccaatactccacaggacaagtgagtgtggaaattgaatgggagctgcagaaagaaaacagcaagcgctggaatcccgaagtgcagtacacatccaattatgcaaaatctgccaacgttgattttactgtggacaacaatggactttatactgagcctcgccccattggcacccgttaccttacccgtcccctg

SEQ ID NO: 659 - DNA, 2208 bp, Artificial Sequence
  Description of Artificial Sequence: Synthetic polynucleotide
atggctgccgatggttatcttccagattggctcgaggacaacctctctgagggcattcgcgagtggtgggacttgaaacctggagccccgaagcccaaagccaaccagcaaaagcaggacgacggccggggtctggtgcttcctggctacaagtacctcggacccttcaacggactcgacaagggggagcccgtcaacgcggcggacgcagcggccctcgagcacgacaaggcctacgaccagcagctcaaagcgggtgacaatccgtacctgcggtataaccacgccgacgccgagtttcaggagcgtctgcaagaagatacgtcttttgggggcaacctcgggcgagcagtcttccaggccaagaagcgggttctcgaacctctcggtctggttgaggaaggcgctaagacggctcctggaaagaaacgtccggtagagcagtcgccacaagagccagactcctcctcgggcatcggcaagacaggccagcagcccgctaaaaagagactcaattttggtcagactggcgactcagagtcagtccccgatccacgacctctcggagaacctccagcaacccccgctgctgtgggacctactacaatggcttcaggcggtggcgcaccaatggcagacaataacgaaggcgccgacggagtgggtaatgcctcaggaaattggcattgcgattccacatggctgggcgacagagtcatcaccaccagcacccgcacctgggccttgcccacctacaataaccacctctacaagcaaatctccagtgcttcaacgggggccagcaacgacaaccactacttcggctacagcaccccctgggggtattttgatttcaacagattccactgccacttttcaccacgcgactggcagcgactcatcaacaacaattggggattccggcccaagagactcaacttcaaactcttcaacatccaagtcaaggaggtcacgacgaatgatggcgtcacaaccatcgctaataaccttaccagcacggttcaagtcttctcggactcggagtaccagcttccgtacgtcctcggctctgcgcaccagggctgcctccctccgttcccggcggacgtgttcatgattccgcaatacggctacctgacgctcaacaatggcagccaagccgtgggacgttcatccttttactgcctggaatatttcccttctcagatgctgagaacgggcaacaactttaccttcagctacacctttgaggaagtgcctttccacagcagctacgcgcacagccagagcctggaccggctgatgaatcctctcatcgaccaatacctgtattacctgaacagaactcaaaatcagtccggaagtgcccaaaacaaggacttgctgtttagccgtgggcctccagctggcatgtctgttcagcccaaaaactggctacctggaccctgttatcggcagcagcgcgtttctaaaacaaaaacagacaacaacaacagcaattttacctggactggtgcttcaaaatataacctcaatgggcgtgaatccatcatcaaccctggcactgctatggcctcacacaaagacgacgaagacaagttctttcccatgagcggtgtcatgatttttggaaaagagagcgccggagcttcaaacactgcattggacaatgtcatgattacggacgaagaggaaattaaagccactaaccctgtggccaccgaaagatttgggaccgtggcagtcaatttccagagcagcagcacagaccctgcgaccggagatgtgcatgctatgggagcattacctggcatggtgtggcaagatagagacgtgtacctgcagggtcccatttgggccaaaattcctcacacagatggacactttcacccgtctcctcttatgggcggctttggactcaagaacccgcctcctcagatcctcatcaaaaacacgcctgttcctgcgaatcctccggcggagttttcagctacaaagtttgcttcattcatcacccaatactccacaggacaagtgagtgtggaaattgaatgggagctgcagaaagaaaacagcaagcgctggaatcccgaagtgcagtacacatccaattatgcaaaatctgccaacgttgattttactgtggacaacaatggactttatactgagcctcgccccattggcacccgttaccttacccgtcccctg

SEQ ID NO: 660 - DNA, 2208 bp, Artificial Sequence
  Description of Artificial Sequence: Synthetic polynucleotide
atggctgccgatggttatcttccagattggctcgaggacaacctctctgagggcattcgcgagtggtgggacttgaaacctggagccccgaagcccaaagccaaccagcaaaagcaggacgacggccggggtctggtgcttcctggctacaagtacctcggacccttcaacggactcgacaagggggagcccgtcaacgcggcggacgcagcggccctcgagcacgacaaggcctacgaccagcagctcaaagcgggtgacaatccgtacctgcggtataaccacgccgacgccgagtttcaggagcgtctgcaagaagatacgtcttttgggggcaacctcgggcgagcagtcttccaggccaagaagcgggttctcgaacctctcggtctggttgaggaaggcgctaagacggctcctggaaagaaacgtccggtagagcagtcgccacaagagccagactcctcctcgggcatcggcaagacaggccagcagcccgctaaaaagagactcaattttggtcagactggcggctcagagtcagtccccgatccacaacctctcggagaacctccagcaacccccgctgctgtgggacctactacaatggcttcaggcggtggcgcaccaatggcagacaataacgaaggcgccgacggagtgggtaatgcctcaggaaattggcattgcgattccacatggctgggcgacagagtcatcaccaccagcacccgcacctgggccttgcccacctacaataaccacctctacaagcaaatctccagtgcttcaacgggggccagcaacgacaaccactacttcggctacagcaccccctgggggtattttgatttcaacagattccactgccacttttcaccacgtgactggcagcgactcatcaacaacaattggggattccggcccaagagactcaacttcaaactcttcaacatccaagtcaaggaggtcacgacgaatgatggcgtcacaaccatcgctaataaccttaccagcacggttcaagtcttctcggactcggagtaccagcttccgtacgtcctcggctctgcgcaccagggctgcctccctccgttcccggcggacgtgttcatgattccgcaatacggctacctgacgctcaacaatggcagccaagccgtgggacgttcatccttttactgcctggaatatttcccttctcagatgctgagaacgggcaacaactttaccttcagctacacctttgaggaagtgcctttccacagcagctacgcgcacagccagagcctggaccggctgatgaatcctcccatcgaccaatacctgtattacctgaacagaactcaaaatcagtccgggagtgcccaaaacaaggacttgctgtttagccgtgggtctccagctggcatgtctgttcagcccaaaaactggctacctggaccctgttatcggcagcagcgcgtttctaaaacaaaaacagacaacaacaacagcaattttacctggactggtgcttcaaaatataacctcaatgggcgtgaatccatcatcaaccctggcactgctatggcctcacacaaagacgacgaagacaagttctttcccatgagcggtgtcatgatttttggaaaagagagcgccggagcttcaaacactgcattggacaatgtcatgattacagacgaagaggaaattaaagccactaaccctgtggccaccgaaagatttgggaccgtggcagtcaatttccagagcagcagcacagaccctgcgaccggagatgtgcatgctatgggagcattacctggcatggtgtggcaagatagagacgtgtacctgcagggtcccatttgggccaaaattcctcacacagatggacactttcacccgtctcctcttatgggcggctttggactcaagaacccgcctcctcagatcctcatcaaaaacacgcctgttcctgcgaatcctccggcggagttttcagctacaaagtttgcttcattcatcacccaatactccacaggacaagtgagtgtggaaattgaatgggagctgcagaaagaaaacagcaagcgctggaatcccgaagtgcagtacacatccaattatgcaaaatctgccaacgttgactttactgtggacaacaatggactttatactgagcctcgccccattggcacccgttaccttacccgtcccctg

SEQ ID NO: 661 - DNA, 2208 bp, Artificial Sequence
  Description of Artificial Sequence: Synthetic polynucleotide
atggctgccgatggttatcttccagattggctcgaggacaacctctctgagggcattcgcgagtggtgggacttgaaacctggagccccgaagcccaaagccaaccagcaaaagcaggacgacggccggggtctggtgcttcctggctacaagtacctcggacccttcaacggactcgacaagggggagcccgtcaacgcggcggacgcagcggccctcgagcacgacaaggcctacgaccagcagctcaaagcgggtgacaatccgtacctgcggtataaccacgccgacgccgagtttcaagagcgtctgcaagaagatacgtcttttgggggcaacctcgggcgagcagtcttccaggccaagaagcgggttctcgaacctctcggtctggttgaggaaggcgctaagacggctcctggaaagaaacgtccggtagagcagtcgccacaagagccagactcctcctcgggcatcggcaagacaggccagcagcccgctaaaaagagactcaattttggtcagactggcgactcagagtcagtccccgatccgcaacctctcggagaacctccagcaacccccgctgctgtgggacctactacaatggcttcaggcggtggcgcaccaatggcagacaataacgaaggcgccgacggagtgggtaatgcctcaggaaattggcattgcgattccacatggctgggcgacagagtcatcaccaccagcacccgcacctgggccttgcccacctacaataaccacctctacaagcaaatctccagtgcttcaacgggggccagcaacgacaaccactacttcggctacagcaccccctgggggtattttgatttcaacagattccactgccacttttcaccacgtgactggcagcgactcatcaacaacaattggggattccggcccaagagactcaacttcaaactcttcaacatccaagtcaaggaggtcacgacgaatgatggcgtcacaaccatcgctaataaccttaccagcacggttcaagtcttctcggactcggagtaccagcttccgtacgtcctcggctctgcgcaccagggctgcctccctccgttcccggcggacgtgttcatgattccgcaatacggctacctgacgctcaacaatggcagccaagccgtgggacgttcatccttttactgcctggaatatttcccttctcagatgctgagaacgggcaacaactttaccttcagctacacctttgaggaagtgcctttccacagcagctacgcgcacagccagagcctggaccggctgatgaatcctctcatcgaccaatacctgtattacctgaacagaactcaaaatcagtccggaagtgcccaaaacaaggacttgctgtttagccgtgggtctccagctggcatgtctgttcagcccaaaaactggctacctggaccctgttatcggcagcagcgcgtttctaaaacaaaaacagacaacaacaacagcaattttacctggactggtgcttcaaaatataacctcaatgggcgtgaatccatcatcaaccctggcactgctgtggcctcacacaaagacgacgaagacaagttctttcccatgagcggtgtcatgatttttggaaaagagagcgccggagcttcaaacactgcattggacaatgtcatgattacagacgaagaggaaattaaagccactaaccctgtggccaccgaaagatttgggaccgtggcagtcaatttccagagcagcagcacagaccctgcgaccggagatgtgcatgctatgggagcattacctggcatggtgtggcaagatagagacgtgtacctgcagggtcccatttgggccaaaattcctcacacagatggacactttcacccgtctcctcttatgggcggctttggactcaagaacccgcctcctcagatcctcatcaaaaacacgcctgttcctgcgaatcctccggcggagttttcagctacaaagtttgcttcattcatcacccaatactccacaggacaagtgagtgtggaaattgaatgggagctgcagaaagaaaacagcaagcgctggaatcccgaagtgcagtacacatccaattatgcaaaatctgccaacgttgattttactgtggacaacaatggactttatactgagcctcgccccattggcacccgttaccttacccgtcccctg

SEQ ID NO: 662 - DNA, 2208 bp, Artificial Sequence
  Description of Artificial Sequence: Synthetic polynucleotide
atggctgccgatggttatcttccagattggctcgaggacaacctctctgagggcattcgcgagtggtgggacttgaaacctggagccccgaagcccaaagccaaccagcaaaagcaggacgacggccggggtctggtgcttcctggctacaagtacctcggacccttcaacggactcgacaagggggagcccgtcaacgcggcggacgcagcggccctcgagcacgacaaggcctacgaccagcagctcaaagcgggtgacaatccgtacctgcggtataaccacgccgacgccgagtttcaggagcgtctgcaagaagatacgtcttttgggggcaacctcgggcgagcagtcttccaggccaagaagcgggttctcgaacctctcggtctggttgaggaaggcgctaagacggctcctggaaagaaacgtccggtagagcagtcgccacaagagccagactcctcctcgggcatcggcaagacaggccagcagcccgctaaaaagagactcaattttggtcagactggcgactcagagtcagtccccgatccacaacctctcggagaacctccagcaacccccgctgctgtgggacctactacaatggcttcaggcggtggcgcaccaatggcagacaataacgaaggcgccgacggagtgggtaatgcctcaggaaattggcattgcgattccacatggctgggcgacagagtcatcaccaccagcacccgcacctgggccttgcccacctacaataaccacctctacaagcaaatctccagtgcttcaacgggggccagcaacgacaaccactacttcggctacagcaccccctgggggtattttgatttcaacagattccactgccacttttcaccacgtgactggcagcaactcatcaacaacaattggggattccggcccaagagactcaacttcaaactcttcaacatccaagtcaaggaggtcacgacgaatgatggcgtcacaaccatcgctaataaccttaccagcacggttcaagtcttctcggactcggagtaccagcttccgtacgtcctcggctctgcgcaccagggctgcctccctccgttcccggcggacgtgttcatgattccgcaatacggctacctgacgctcaacaatggcagccaagccgtgggacgttcatccttttactgcctggaatatttcccttctcagatgctgagaacgggcaacaactttaccttcagctacacctttgaggaagtgcctttccacagcagctacgcgcacagccagagcctggaccggctgatgaatcctctcatcgaccaatacctgtattacctgaacagaactcaaaatcagtccggaagtgcccaaaacaaggacttgctgtttagccgtgggtctccagctggcatgtctgttcagcccaaaaactggctacctggaccctgttatcggcagcagcgcgtttctaaaacaaaaacagacaacaacaacagcaattttacctggactggtgcttcaaaatataacctcaatgggcgtgaatccatcatcaaccctggcactgctatggcctcacacaaagacgacgaagacaagttctttcccatgagcggtgtcatgatttttggaaaagagagcgccggagcttcaaacactgcattggacaatgtcatgattacagacgaagaggaaattaaagccactaaccctgtggccaccgaaagatttgggaccgtggcagtcaatttccagagcaccagcacagaccctgcgaccggagatgtgcatgctatgggagcattacctggcatggtgtggcaagatagagacgtgtacctgcagggtcccatttgggccaaaattcctcacacagatggacactttcacccgtctcctcttatgggcggctttggactcaagaacccgcctcctcagatcctcatcaaaaacacgcctgttcctgcgaatcctccggcggagttttcagctacaaagtttgcttcattcatcacccaatactccacaggacaagtgagtgtggaaattgaatgggagctgcagaaagaaaacagcaagcgctggaatcccgaagtgcagtacacatccaattatgcaaaatctgccgacgttgattttactgtggacaacaatggactttatactgagcctcgccccattggcacccgttaccttacccgtcccctg

SEQ ID NO: 663 - DNA, 2208 bp, Artificial Sequence
  Description of Artificial Sequence: Synthetic polynucleotide
atggctgccgatggttatcttccagattggctcgaggacaacctctctgagggcattcgcgagtggtgggacttgaaacctggagccccgaagcccaaagccaaccagcaaaagcaggacgacggccggggtctggtgcttcctggctacaagtacctcggacccttcaacggactcgacaagggggagcccgtcaacgcggcggacgcagcggccctcgagcacgacaaggcctacgaccagcagctcaaagcgggtgacaatccgtacctgcggtataaccacgccgacgccgagtttcaagagcgtctgcaagaagatacgtcttttgggggcaacctcgggcgagcagtcttccaggccaagaagcgggttctcgaacctctcggtctggttgaggaaggcgctaagacggctcctggaaagaaacgtccggtagagcagtcgccacaagagccagactcctcctcgggcatcggcaagacaggccagcagcccgctaaaaagagactcaattttggtcagactggcgactcagagtcagtccccgatccgcaacctctcggagaacctccagcaacccccgctgctgtgggacctactacaatggcttcaggcggtggcgcaccaatggcagacaataacgaaggcgccgacggagtgggtaatgcctcaggaaattggcattgcgattccacatggctgggcgacagagtcatcaccaccagcacccgcacctgggccttgcccacctacaataaccacctctacaagcaaatctccagtgcttcaacgggggccagcaacgacaaccactacttcggctacagcaccccctgggggtattttgatttcaacagattccactgccacttttcaccacgtgactggcagcgactcatcaacaacaattggggattccggcccaagagactcaacttcaaactcttcaacatccaagtcaaggaggtcacgacgaatgatggcgtcacaaccatcgctaataaccttaccagcacggttcaagtcttctcggactcggagtaccagcctccgtacgtcctcggctctgcgcaccagggctgcctccctccgttcccggcggacgtgttcatgattccgcaatacggccacctgacgctcaacaatggcagccaagccgtgggacgttcatccttttactgcctggaatatttcccttctcagatgctgagaacgggcaacaactttaccttcagctacacctttgaggaagtgcctttccacagcagctacgcgcacagccagagcctggaccggctgacgaatcctctcatcgaccaatacctgtattacctgaacagaactcaaaatcagtccggaagtgcccaaaacaaggacttgctgtttagccgtgggtctccagctggcatgtctgttcagcccaaaaactggctacctggaccctgttatcggcagcagcgcgtttctaaaacaaaaacagacaacaacaacagcaattttacctggactggtgcttcaaaatataacctcaatgggcgtgaatccatcatcaaccctggcactgctatggcctcacacaaagacgacgaagacaagttctttcccatgagcggtgtcatgatttttggaaaagagagcgccggagcttcaaacactgcattggacaatgtcatgattacagacgaagaggaaattaaagccactaaccctgtggccaccgaaagatttgggaccgtggcagtcaatttccagagcagcagcacagaccctgcgaccggagatgtgcatgctatgggagcattacctggcatggtgtggcaagatagagacgtgtacctgcagggtcccatttgggccaaaattcctcacacagatggacactttcacccgtctcctcttatgggcggctttggactcaagaacccgcctcctcagatcctcatcaaaaacacgcctgttcctgcgaatcctccggcggagttttcagctacaaagtttgcttcattcatcacccaatactccacaggacaagtgagtgtggaaattgaatgggagctgcagaaagaaaacagcaagcgctggaatcccgaagtgcagtacacatccaattatgcaaaatctgccaacgttgattttactgtggacaacaatggactttatactgagcctcgccccattggcacccgttaccttacccgtcccctg

SEQ ID NO: 664 - DNA, 2208 bp, Artificial Sequence
  Description of Artificial Sequence: Synthetic polynucleotide
atggctgccgatggttatcttccagattggctcgaggacaacctctctgagggcattcgcgagtggtgggacttgaaacctggagccccgaagcccaaagccaaccagcaagagcaggacgacggccggggtctggtgcttcctggctacaagtacctcggacccttcaacggactcgacaagggggagcccgtcaacgcggcggacgcagcggccctcgagcacgacaaggcctacgaccagcagctcaaagcgggtgacaatccgtacctgcggtataaccacgccgacgccgagtttcaggagcgtctgcaagaagatacgtcttttgggggcaacctcgggcgagcagtcttccaggccaagaagcgggttctcgaacctctcggtctggttgaggaaggcgctaagacggctcctggaaagaaacgtccggtagagcagtcgccacaagagccagactcctcctcgggcatcggcaagacaggccagcagcccgctaaaaagagactcaattttggtcagactggcgactcagagtcagtccccgatccacaacctctcggagaacctccagcaacccccgctgctgtgggacctactacaatggcttcaggcggtggcgcaccaatggcagacaataacgaaggcgccgacggagtgggtaatgcctcaggaaattggcattgcgattccacatggctgggcgacagagtcatcaccaccagcacccgcacctgggccttgcccacctacaataaccacctctacaagcaaatctccagtgcttcaacgggggccagcaacgacaaccactacttcggctacagcaccccctgggggtattttgatttcaacagattccactgccacttttcaccacgtgactggcagcgactcatcaacaacaattggggattccggcccaagagactcaacttcaaactcttcaacatccaagtcaaggaggtcacgacgaatgatggcgtcacaaccatcgctaataaccttaccagcacggttcaagtcttctcggactcggagtaccagcttccgtacgtcctcggctctgcgcaccagggctgcctccctccgttcccggcggacgtgttcatgattccgcaatacggctacctgacgctcaacaatggcagccaagccgtgggacgttcatccttttactgcctggaatatttcccttctcagatgctgagaacgggcaacaactttaccttcagctacacctttgaggaagtgcctttccacagcagctacgcgcacagccagagcctggaccggctgatgaatcctctcatcgaccaatacctgtattacctgaacagaactcaaaatcagtccggaagtgcccaaaacaaggacttgctgtttagccgtgggtctccagctggcatgtctgttcagcccaaaaactggctacctggaccctgttatcggcagcagcgcgtttctaaaacaaaaacagacaacaacaacagcaattttacctggactggtgcttcaaaatataacctcaatgggcgtgaatccatcatcaaccctggcactgctatggcctcacacaaagacgacgaagacaagttctttcccatgagcggtgtcatgatttttggaaaagagagcgccggagcttcaaacactgcattggacaatgtcatgattacagacgaagaggaaattaaagccactaaccctgtggccaccgaaagatttgggaccgtggcagtcaatttccagagcagcagcacagaccctgcgaccggagatgtgcatgctacgggaacattacctggcatggtgtggcaagatagagacgtgtacctgcagggtcccatttgggccaaaattcctcacacagatggacactttcacccgtctcctcttatgggcggctttggactcaagaacccgcctcctcagatcctcatcaaaaccacgcctgttcctgcgaatcctccggcggagttttcagctacaaagtttgcttcattcatcacccagtactccacaggacaagtgagtgtggaaattgaatgggagctgcagaaagaaaacagcaagcgctggaatcccgaagtgcagtacacatccaattatgcaaaatctgccaacgttgattttactgtggacgacaatggactttatactgagcctcgccccattggcacccgttaccttacccgtcccctg

SEQ ID NO: 665 - DNA, 2208 bp, Artificial Sequence
  Description of Artificial Sequence: Synthetic polynucleotide
atggctgccgatggttatcttccagattggctcgaggacaacctctctgagggcattcgcgagtggtgggacttgaaacctggagccccgaagcccaaagccaaccagcaaaagcaggacgacggccggggtctggtgcttcctggctacaagtacctcggacccttcaacggactcgacaagggggagcccgtcaacgcggcggacgcagcggccctcgagcacgacaaggcctacgaccagcagctcaaagcgggtgacaatccgtacctgcggtataaccacgccgacgccgagtttcaggagcgtctgcaagaagatacgtcttttgggggcaacctcgggcgagcagtcttccaggccaagaagcgggttctcgaacctctcggtctggttgaggaaggcgctaagacggctcctggaaagaaacgtccggtagagcagtcgctacaagagccagactcctcctcgggcatcggcaagacaggccagcagcccgctaaaaagagactcaattttggtcagactggcgactcagagtcagtccccgatccacaacctctcggagaacctccagcaacccccgctgctgtgggacctactacaatggcttcaggcggtggcgcaccaatggcagacaataacgaaggcgccgacggagtgggtaatgcctcaggaaattggcattgcgattccacatggctgggcgacagagtcatcaccaccagcacccgcacctgggccttgcccacctacaataaccacctctacaagcaaatctccagtgcttcaacgggggccagcaacgacaaccactacttcggctacagcaccccctgggggtattttgatttcaacagattccactgccacttttcaccacgtgactggcagcgactcatcaacaacaattggggattccggcccaagagactcaacttcaaactcttcaacatccaagtcaaggaggtcacgacgaatgatggcgtcacaaccatcgctaataaccttaccagcacggttcaagtcttctcggactcggagtaccagcttccgtacgtcctcggctctgcgcaccagggctgcctccctccgttcccggcggacgtgttcatgattccgcaatacggctacctgacgctcaacaatggcagccaagccgtgggacgttcatccttttactgcctggaatatttcccttctcagatgctgagaacgggcaacaactttaccttcagctacacctttgaggaagtgcctttccacagcagctacgcgcacagccagagcctggaccggctgatgaatcctctcatcgaccaatacctgtattacctgaacagaactcaaaatcagtccggaagtgcccaaaacaaggacttgctgtttagccgtgggtctccagctggcatgtctgttcagcccaaaaactggctacctggaccctgttatcggcagcagcgcgtttctaaaacaaaaacagacaacgacaacagcaattttacctggactggtgcttcaaaatataacctcaatgggcgtgaatccatcatcaaccctggcactgctatggcctcacacaaagacgacgaagacaagttctttcccatgagcggtgtcatgatttttggaaaagagagcgccggagcttcaaacactgcattggacaatgtcatgattacagacgaagaggaaattaaagccactaaccctgtggccaccgaaagatttgggaccgtggcagtcaatttccagagcagcagcacagaccctgcgaccggagatgtgcatgctatgggagcattacctggcatggtgtggcaagatagagacgtgtacctgcagggtcccatttgggccaaaattcctcacacagatggacactttcacccgtctcctcttatgggcggctttggactcaagaacccgcctcctcagatcctcatcaaaaacacgcctgttcctgcgaatcctccggcggagttttcagctacaaagtttgcttcattcatcacccaatactccacaggacaagtgagtgtggaaattgaatgggagctgcagaaagaaaacagcaagcgctggaatcccgaagtgcagtacacatccaattatgcaaaatctgccaacgttgattttactgtggacaacaatggactttatactgagcctcgccccattggcacccgttaccttacccgtcccctg

SEQ ID NO: 666 - DNA, 2208 bp, Artificial Sequence
  Description of Artificial Sequence: Synthetic polynucleotide
atggctgccgatggttatcttccagattggctcgaggacaacctctctgagggcattcgcgagtggtgggacttgaaacctggagctccgaagcccaaagccaaccagcaaaagcaggacgacggccggggtctggtgcttcctggctacaagtacctcggacccttcaacggactcgacaagggggagcccgtcaacgcggcggacgcagcggccctcgagcacgacaaggcctacgaccagcagctcaaagcgggtgacaatccgtacctgcggtataaccacgccgacgccgagtttcaggagcgtctgcaagaagatacgtcttttgggggcaacctcgggcgagcagtcttccaggccaagaagcgggttctcgaacctctcggtctggttgaggaaggcgctaagacggctcctggaaagaaacgtccggtagagcagtcgccacaagagccagactcctcctcgggcatcggcaagacaggccagcagcccgctaaaaagagactcaattttggtcagactggcgactcagagtcagtccccgatccacaacctctcggagaacctccagcaacccccgctgctgtgggacctactacaatggcttcaggcggtggcgcaccaatggcagacaataacgaaggcgccgacggagtgggtaatgcctcaggaaattggcattgcgattccacatggctgggcgacagagtcatcaccaccagcacccgcacctgggccttgcccacctacaataaccacctctacaagcaaatctccagtgcttcaacgggggccagcaacgacaaccactacttcggctacagcaccccctgggggtattttgatttcaacagattccactgccacttttcaccacgtgactggcagcgactcatcaacaacaattggggattccggcccaagagactcaacttcaaactcttcaacatccaagtcaaggaggtcacgacgaatgatggcgtcacaaccatcgctaataaccttaccagcacggttcaagtcttctcggactcggagtaccagcttccgtacgtcctcggctctgcgcaccagggctgcctccctccgttcccggcggacgtgttcatgattccgcaatacggctacctgacgctcaacaatggcagccaagccgtgggacgttcatccttttactgcctggaatatttcccttctcagatgctgagaacgggcaacaactttaccttcagctacacctttgaggaagcgcctttccacagcagctacgcgcacagccagagcctggaccggctgatgaatcctctcatcgaccaatacctgtattacctgaacagaactcaaaatcagtccggaagtgcccaaaacaaggacttgctgtttagccgtgggtctccagctggcatgtctgttcagcccaaaaactggctacctggaccctgttatcggcagcagcgcgtttctaaaacaaaaacagacaacaacaacagcaattttacctggactggtgcttcaaaatataacctcaatgggcgtgaatccatcatcaaccctggcactgctatggcctcacacaaagacgacgaagacaagttctttcccatgagcggtgtcatgatttttggaaaagagagcgccggagcttcaaacactgcattggacaatgtcatgattacagacgaagaggaaattaaagccactaaccctgtggccaccgaaagatttgggaccgtggcagtcaatttccagagcagcagcacagaccctgcgaccggagatgtgcatgctatgggagcattacctggcatggtgtggcaagatagagacgtgtacctgcagggtcccatttgggccaaaattcctcacacagatggacactttcacccgtctcctcttatgggcggctttggactcaagaacccgcctcctcagatcctcatcaaaaacacgcctgttcctgcgaatcctccggcggagttttcagctacaaagtttgcttcattcatcacccaatactccacaggacaagtgagtgtggaaattgaatgggagctgcagaaagaaaacagcaagcgctggaatcccgaagtgcagtacacatccaattatgcgaaatctgccaacgttgattttactgtggacaacaatggactttatactgagcctcgccccgttggcacccgttaccttacccgtcccctg

SEQ ID NO: 667 - DNA, 2208 bp, Artificial Sequence
  Description of Artificial Sequence: Synthetic polynucleotide
atggctgccgatggttatcttccagattggctcgaggacaacctctctgagggcattcgcgagtggtgggacttgaaacctggagccccgaagcccaaagccaaccagcaaaagcaggacgacggccggggtctggtgcttcctggctacaagtacctcggacccttcaacggactcgacaagggggagcccgtcaacgcggcggacgcagcggccctcgagcacgacaaggcctacgaccagcagctcaaagcgggtgacaatccatacctgcggtataaccacgccgacgccgagtttcaggagcgtctgcaagaaaatacgtcttttgggggcaacctcgggcgagcagtcttccaggccaagaagcgggttctcgaacctctcggtctggttgaggaaggcgctaagacggctcctggaaagaaacgtccggtagagcagtcgccacaagagccagactcctcctcgggcatcggcaagacaggccagcagcccgctaaaaagagactcaattttggtcagactggcgactcagagtcagtccccgatccacaacctctcggagaacctccagcaacccccgctgctgtgggacctactacaatggcttcaggcggtggcgcaccaatggcagacaataacgaaggcgccgacggagtgggtaatgcctcaggaaattggcattgcgattccacatggctgggcgacagagtcatcaccaccagcacccgcacctgggccttgcccacctacaataaccacctctacaagcaaatctccagtgcttcaacgggggccagcaacgacaaccactacttcggctacagcaccccctgggggtattttgatttcaacagattccactgccactttccaccacgtgactggcagcgactcatcaacaacaattggggattccggcccaagagactcaacttcaaactcttcaacatccaagtcaaggaggtcacgtcgaatgatggcgtcacaaccatcgctaataaccttaccagcacggttcaagtcttctcggactcggagtaccagcttccgtacgtcctcggctctgcgcaccagggctgcctccctccgttcccggcggacgtgttcatgattccgcaatacggctacctgacgctcaacaatggcagccaagccgtgggacgttcatccttttactgcctggaatatttcccttctcagatgctgagaacgggcaacaactttaccttcagctacacctttgaggaagtgcctttccacagcagctacgcgcacagccagagcctggaccggctgatgaatcctctcatcgaccaatacctgtattacctgaacagaactcaaaatcagtccggaagtgcccaaaacaaggacttgctgtttagccgtgggtctccagctggcatgtctgttcagcccaaaaactggctacctggtccctgttatcggcagcagcgcgtttctaaaacaaaaacagacaacaacaacagcaattttacctggactggtgcttcaaaatataacctcaatgggcgtgaatccatcatcaaccctggcactgctatggcctcacacaaagacgacgaagacaagttctttcccatgagcggtgtcatgatttttggaaaagagagcgccggagcttcaaacactgcattggacaatgtcatgattacagacgaagaggaaattaaagccactaaccctgtggccaccgaaagatttgggaccgtggcagtcaatttccagagcagcagcacagaccctgcgaccggagatgtgcatgctatgggagcattacctggcatggtgtggcaagatagagacgtgtacctgcagggtcccatttgggccaaaattcctcacacagatggacactttcacccgtctcctcttatgggcggctttggactcaagaacccgcctcctcagatcctcatcaaaaacacgcctgttcctgcgaatcctccggcggagttttcagctacaaagtttgcttcattcatcacccaatactccacaggacaagtgagtgtggaaattgaatgggagctgcagaaagaaaacagcaagcgctggaatcccgaagtgcagtacacatccaattatgcaaaatctgccaacgttgattttactgtggacaacaatggactttatactgagcctcgccccattggcacccgttaccttacccgtcccctg

SEQ ID NO: 668 - DNA, 2208 bp, Artificial Sequence
  Description of Artificial Sequence: Synthetic polynucleotide
atggctgccgatggttatcttccagattggctcgaggacaacctctctgagggcattcgcgagtggtgggacttgaaacctggagccccgaagcccaaagccaaccagcaaaagcaggacgacggccggggtctggtgcttcctggctacaagtacctcggacccttcaacggactcgacaagggggagcccgtcaacgcggcggacgcagcggccctcgagcacgacaaggcctacgaccagcagctcaaagcgggtgacaatccgtacctgcggtataaccacgccgacgccgagtttcaggagcgtctgcaagaagatacgtcttttgggggcaacctcgggcgagcagtcttccaggccaagaagcgggttctcgaacctctcggtctggttgaggaaggcgctaagacggctcctggaaagaaacgtccggtagagcagtcgccacaagagccagactcctcctcgggcatcggcaagacaggccagcagcccgctaaaaagagactcaattttggtcagactggcgactcagagtcagtccccgatccacaacctctcggagaacctccagcaacccccgctgctgtgggacctactacaatggcttcaggcggtggcgcaccaatggcagacaataacgaaggcgccgacggagtgggtaatgcctcaggaaattggcattgcgattccacatggctgggcgacagagtcatcaccaccagcacccgcacctgggccttgcccacctacaataaccacctctacaagcaaatctccagtgcttcaacgggggccagcaacgacaaccactacttcggctacagcaccccctgggggtattttgatttcaacagattccactgccacttttcaccacgtgactggcagcgactcatcaacaacaattggggattccggcccaagagactcaacttcaaactcttcaacatccaagtcaaggaggtcacgacgaatgatggcgtcacaaccatcgctaataaccttaccagcacggttcaagtcttctcggactcggagtaccagcttccgtacgtcctcggctctgcgcaccagggctgcctccctccgttcccggcggacgtgttcatgattccgcaatacggctacctgacgctcaacaatggcagccaagccgtgggacgttcatccttttactgcctggaatatttcccttctcagatgctgagaacgggcaacaactttaccttcagctacacctttgaggaagtgcctttccacagcagctacgcgcacagccagagcctggaccggctgatgaatcctctcatcgaccaatacctgtattacctgaacagaactcaaaatcagtccggaagtgcccaaaacaaggacttgctgtttagccgtgggtctccagctggcacgtctgttcagcccaaaaactggctacctggaccctgttatcggcagcagcgcgtttctaaaacaaaaacagacaacaacaacagcaattttacctggactggtgcttcaaaatataacctcaatgggcgtgaatccatcatcaaccctggcactgctatggcctcacacaaagacgacgaagacaagttctttcccatgagcggtgtcatgatttttggaaaagagagcgccggagcttcaaacactgcattggacaatgtcatgattacagacgaagaggaaattaaagccactaaccctgtggccaccgaaagatttgggaccgtggcagtcaatttccagagcagcagcacagaccctgcgaccggagatgtgcatgctatgggagcattacctggcatggtgtggcaagatagagacgtgtacctgcagggtcccatttgggccaaaattcctcacacagatggacactttcacccgtctcctcttatgggcggctttggactcaagaacccgcctcctcagatcctcatcaaaaacacgcctgttcctgcgaatcctccggcggagttttcagctacaaagtttgcttcattcatcacccaatactccacaggacaagtgagtgtggaaattgaatgggagctgcagaaagaaaacagcaagcgctggaatcccgaagtgcagtacacatccaattatgcaaaatctgccaacgttgattttactgtggacaacaatggactttatactgggcctcgccccattggcacccgttaccttacccgtcccctg

SEQ ID NO: 669 - DNA, 2208 bp, Artificial Sequence
  Description of Artificial Sequence: Synthetic polynucleotide
atggctgccgatggttatcttccagattggctcgaggacaacctctctgagggcattcgcgagtggtgggacttgaaacctggagccccgaagcccaaagccaaccagcaaaagcaggacgacggccggggtctggtgcttcctggctacaagtacctcggacccttcaacggactcgacaagggggagcccgtcaacgcggcggacgcagcggccctcgagcacgacaaggcctacgaccagcagctcaaagcgggtgacaatccgtacctgcggtataaccacgccgacgccgagtttcaggagcgtctgcaagaagatacgtcttttgggggcaacctcgggcgagcagtcttccaggccaagaagcgggttctcgaacctctcggtctggttgaggaaggcgctaagacggctcctggaaagaaacgtccggtagagcagtcgccacaagagccagactcctcctcgggcatcggcaagacaggccagcagcccgctaaaaagagactcaattttggtcagactggcgactcagagtcagtccccgatccacaacctctcggagaacctccagcaacccccgctgctgtgggacctactacaatggcttcaggcggtggcgcaccaatggcagacaataacgaaggcgccgacggagtgggtaatgccccaggaaattggcattgcgactccacatggctgggcgacagagtcatcaccaccagcacccgcacctgggccttgcccacctacaataaccacctctacaagcaaatctccagtgcttcaacgggggccagcaacgacaaccactacttcggctacagcaccccctgggggtattttgatttcaacagattccactgccacttttcaccacgtgactggcagcgactcatcaacaacaattggggattccggcccaagagactcaacttcaaactcttcaacatccaagtcaaggaggtcacgacgaatgatggcgtcacaaccatcgctaataaccttaccagcacggttcaagtcttctcggactcggagtaccagcttccgtacgtcctcggctctgcgcaccagggctgcctccctccgttcccggcggacgtgttcatgattccgcaatacggctacctgacgctcaacaatggcagccaagccgtgggacgttcatccttttactgcctggaatatttcccttctcagatgctgagaacgggcaacaactttaccttcagctacacctttgaggaagtgcctttccacagcagctacgcgcacagccagagcctggaccggctgatgaatcctctcatcgaccaatacctgtattacctgaacagaactcaaaatcagtccggaagtgcccaaaacaaggacttgctgtttagccgtgggtctccagctggcatgtctgttcagcccaaaaactggctacctggaccctgttatcggcagcagcgcgtttctaaaacaaaaacagacaacaacaacagcaattttacctggactggtgcttcaaaatataacctcaatgggcgtgaatccatcatcaaccctggcacagctatggcctcacacaaagacgacgaagacaagttctttcccatgagcggtgtcatgatttttggaaaagagagcgccggagcttcaaacactgcattggacaatgtcatgattacaggcgaagaggaaattaaagccactaaccctgtggccaccgaaagatttgggaccgtggcagtcaatttccagagcagcagcacagaccctgcgaccggagatgtgcatgctatgggagcattacctggcatggtgtggcaagatagagacgtgtacctgcagggtcccatttgggccaaaattcctcacacagatggacactttcacccgtctcctcttatgggcggctttggactcaagaacccgcctcctcagatcctcatcaaaaacacgcctgttcctgcgaatcctccggcggagttttcagctacaaagtttgcttcattcatcacccaatactccacaggacaagtgagtgtggaaattgaatgggagctgcagaaagaaaacagcaagcgctggaatcccgaagtgcagtacacatccaattatgcaaaatctgccaacgttgattttactgtggacaacaatggactttatactgagcctcgccccattggcacccgttaccttacccgtcccctg

SEQ ID NO: 670 - DNA, 2208 bp, Artificial Sequence
  Description of Artificial Sequence: Synthetic polynucleotide
atggctgccgatggttatcttccagattggctcgaggacaacctctctgagggcattcgcgagtggtgggacttgaaacctggagccccgaagcccaaagccaaccagcaaaagcaggacgacggccggggtctggtgcttcctggctacaagtacctcggacccttcaacagactcgacaagggggagcccgtcaacgcggcggacgcagcggccctcgagcacgacaaggcctacgaccagcagctcaaagcgggtgacaatccgtacctgcggtataaccacgccgacgccgagtttcaggagcgtctgcaagaagatacgtcttttgggggcaacctcgggcgagcagtcttccaggccaagaagcgggttctcgaacctctcggtctggttgaggaaggcgctaagacggctcctggaaggaaacgtccggtagagcagtcgccacaagagccagactcctcctcgggcatcggcaagacaggccagcagcccgctaaaaagagactcaattttggtcagactggcgactcagagtcagtccccgatccacaacctctcggagaacctccagcaacccccgctgctgtgggacctactacaatggcttcaggcggtggcgcgccaatggcagacaataacgaaggcgccgacggagtgggtaatgcctcaggaaattggcattgcgattccacatggctgggcgacagagtcatcaccaccagcacccgcacctgggccttgcccacctacaataaccacctctacaagcaaatctccagtgcttcaacgggggccagcaacgacaaccactacttcggctacagcaccccctgggggtattttgatttcaacagattccactgccacttttcaccacgtgactggcagcgactcatcaacaacaattggggattccggcccaagagactcaacttcaaactcttcaacatccaagtcaaggaggtcacgacgaatgatggcgtcacaaccatcgctaataaccttaccagcacggttcaagtcttctcggactcggagtaccagcttccgtacgtcctcggctctgcgcaccagggctgcctccctccgttcccggcggacgtgttcatgattccgcaatacggctacctgacgctcaacaatggcggccaagccgtgggacgttcatccttttactgcctggaatatttcccttctcagatgctgagaacgggcaacaactttaccttcagctacacctttgaggaagtgcctttccacagcagctacgcgcacagccagagcctggaccggctgatgaatcctctcatcgaccaatacctgtattacctgaacagaactcaaaatcagtccggaagtgcccaaaacaaggacttgctgtttagccgtgggtctccagctggcatgtctgttcagcccaaaaactggctacctggaccctgttatcggcagcagcgcgtttctaaaacaaaaacagacaacaacaacagcaattttacctggactggtgcttcaaaatatagcctcaatgggcgtgaatccatcatcaaccctggcactgctatggcctcacacaaagacgacgaagacaagttctttcccatgggcggtgtcatgatttttggaaaagagagcgccggagcttcaaacactgcattggacaatgccatgattacagacgaagaggaaattaaagccactaaccctgtggccaccgaaagatttgggaccgtggcagtcaatttccagagcagcagcacagaccctgcgaccggagatgtgcatgctatgggagcattacctggcatggtgtggcaagatagagacgtgtacctgcagggtcccatttgggccaaaattcctcacacagatggacactttcacccgtctcctcttatgggcggctttggactcaagaacccgcctcctcagatcctcatcaaaaacacgcctgttcctgcgaatcctccggcggagttttcagctacaaagtttgcttcattcatcacccaatactccacaggacaagtgagtgtggaaattgaatgggagctgcagaaagaaaacagcaagcgctggaatcccgaagtgcagtacacatccaattatgcaaaatctgccaacgttgattttactgtggacaacaatggactttatactgagcctcgccccattggcacccgttaccttacccgtcccctg

SEQ ID NO: 671 - DNA, 2208 bp, Artificial Sequence
  Description of Artificial Sequence: Synthetic polynucleotide
atggctgccgatggttatcttccagattggctcgaggacaacctctctgagggcattcgcgagtggtgggacttgaaacctggagccccgaagcccaaagccaaccagcaaaagcaggacgacggccggggtctggtgcttcctggctacaagtacctcggacccttcaacggactcgacaagggggagcccgtcaacgcggcggacgcagcggccctcgagcacgacaaggcctacgaccagcagctcaaagcgggtgacaatccgtacctgcggtataaccacgccgacgccgagtttcaggagcgtctgcaagaagatacgtcttttgggggcaacctcgggcgagcagtcttccaggccaagaagcgggttctcgaacctctcggtctggttgaggaaggcgctaagacggctcctggaaagaaacgtccggtagagcagtcgccacaagagccagactcctcctcgggcatcggcaagacaggccagcagcccgctaaaaagagactcaattttggtcagactggcgactcagagtcagtccccgatccacaacctctcggagaacctccagcaacccccgctgctgtgggacctactacaatggcttcaggcggtggcgcaccaatggcagacaataacgaaggcgccgacggagtgggtaatgcctcaggaaattggcattgcgattccacatggctgggcggcagagtcatcaccaccagcacccgcacctgggccttgcccacctacaataaccacctctacaagcaaatctccagtgcttcaacgggggccagcaacgacaaccactacttcggctacagcaccccctgggggtattttgatttcaacagattccactgccacttttcaccacgtgactggcagcgactcatcaacaacaattggggattccggcccaagagactcaacttcaaactcttcaacatccaagtcaaggaggtcacgacgaatgatggcgtcacaaccatcgctaataaccttaccagcacggttcaagtcttctcggactcggagtaccagcttccgtacgtcctcggctctgcgcaccagggctgcctccctccgttcccggcggacgtgttcatgattccgcaatacggctacctgacgctcaacaatggcagccaagccgtgggacgttcatccttttactgcctggaatatttcccttctcagatgctgagaacgggcaacaactctaccttcagctacacctttgaggaagtgcctttccacagcagctacgcgcacagccagagcctggaccggctgatgaatcctctcatcgaccaatacctgtattacctgaacagaactcaaaatcagtccggaagtgcccaaaacaaggacttgctgtttagccgtgggtctccagctggcatgtctgttcagcccaaaaactggctacctggaccctgttatcggcagcagcgcgtttctaaaacaaaaacagacaacaacaacagcaattttacctggactggtgcttcaaaatataacctcaatgggcgtgaatccatcatcaaccctggcactgctatggcctcacacaaagacgacgaagacaagttctttcccatgagcggtgtcatgatttttggaaaagagagcgccggagcttcaaacactgcattggacaatgtcatgattacagacgaagaggaaattaaagccactaaccctgtggccaccgaaagatttgggaccgtggcagtcaatttccagagcagcagcacagaccctgcgaccggagatgtgcatgctatgggaacattacctggcatggtgtggcaagatagagacgtgtacctgcagggtcccatttgggccaaaattcctcacacagatggacactttcacccgtctcctcttatgggcggctttggactcaagaacccgcctcctcagatcctcatcaaaaacacgcctgttcctgcgaatcctccggcggagttttcagctacaaagtttgcttcattcatcacccaatactccacaggacaagtgagtgtggaaattgaatgggagctgcagaaagaaaacagcaagcgctggaatcccgaagtgcagtacacatccaattatgcaaaatctgccaacgttgattttactgtggacaacaatggactttatactgagcctcgccccattggcacccgttaccttacccgtcccctg

SEQ ID NO: 672 - DNA, 2208 bp, Artificial Sequence
  Description of Artificial Sequence: Synthetic polynucleotide
atggctgccgatggttatctcccagattggctcgaggacaacctctctgagggcattcgcgagtggtgggacttgaaacctggagccccgaagcccaaagccaaccagcaaaagcaggacgacggccggggtctggtgcttcctggctacaagtacctcggacccttcaacggactcgacaagggggagcccgtcagcgcggcggacgcagcggccctcgagcacgacaaggcctacgaccagcagctcaaagcgggtgacaatccgtacctgcggtataaccacgccgacgccgagtttcaggagcgtctgcaagaagatacgtcttttgggggcaacctcgggcgagcagtcttccaggccaagaagcgggttctcgaacctctcggtctggttgaggaaggcgctaagacggctcctggaaagaaacgtccggtagagcagtcgccacaagagccagactcctcctcgggcatcggcaagacaggccagcagcccgctaaagagagactcaattttggtcagactggcgactcagagtcagtccccgatccacaacctctcggagaacctccagcaacccccgctgctgtgggacctactacaatggcttcaggcggtggcgcaccaatggcagacaataacgaaggcgccgacggagtgggtaatgcctcaggaaattggcattgcgattccacatggctgggcgacagagtcatcaccaccagcacccgcacctgggccttgcccacctacaataaccacctctacaagcaaatctccagtgcttcaacgggggccagcaacgacaaccactacttcggctacagcaccccctgggggtattttgatttcaacagattccactgccacttttcaccacgtgactggcagcgactcatcaacaacaattggggattccggcccaagagactcaacttcaaactcttcaacatccaagtcaaggaggtcacgacgaatgatggcgtcacaaccatcgccaataaccttaccagcacggttcaagtcttctcggactcggagtaccagcttccgtacgtcctcggctctgcgcaccagggctgcctccctccgttcccggcggacgtgttcatgattccgcaatacggctacctgacgctcaacaatggcagccaagccgtgggacgttcatccttttactgcctggaatatttcccttctcagatgctgagaacgggcaacaactttaccttcagctacacctttgaggaagtgcctttccacagcagctacgcgcacagccagagcctggaccggctgatgaatcctctcatcgaccaatacctgtattacctgaacagaactcaaaatcagtccggaagtgcccaaaacaaggacttgctgtttagccgtgggtctccagctggcatgtctgttcagcccaaaaactggctacctggaccctgttatcggcagcagcgcgtttctaaaacaaaaacagacaacaacaacagcaattttacctggactggtgcttcaaaatataacctcaatgggcgtgaatccatcatcaaccctggcactgctatggcctcacacaaagacgacgaagacaagttctttcccatgagcggtgtcatgatttttggaaaagagagcgccggagcttcaaacactgcattggacaatgtcatgattacagacgaagaggaaattaaagccactaaccctgtggccaccgaaagatttgggaccgtggcagtcaatttccagagcagcagcacagaccctgcgaccggagatgtgcatgctatgggagcattacctggcatggtgtggcaagatagagacgtgtacctgcagggtcccatttgggccaaaattcctcacacagatggacactttcacccgtctcctcttatgggcggctttggactcaagaacccgcctcctcagatcctcatcaaaaacacgcctgttcctgcgaatcctccggcggagttttcagctacaaagtttgcttcattcatcacccaatactccacaggacaagtgagtgtggaaattgaatgggagctgcagaaagaaaacagcaagcgctggaatcccgaagtgcagtacacatccaattatgcaaaatctgccaacgttgattttactgtggacaacaatggactttatactgagcctcgccccattggcacccgttaccttacccgtcccctg

SEQ ID NO: 673 - DNA, 2208 bp, Artificial Sequence
  Description of Artificial Sequence: Synthetic polynucleotide
atggctgccgatggttatcttccagattggctcgaggacaacctctctgagggcattcgcgagtggtgggacttgaaacctggagccccgaagcccaaagccaaccagcaaaagcaggacgacggccggggtctggtgcttcctggctacaagtacctcggacccttcaacggactcgacaagggggagcccgtcaacgcggcggacgcagcggccctcgagcacgacaaggcctacgaccagcagctcaaagcgggtgacaatccgtacctgcggtataaccacgccgacgccgagtttcaggagcgtctgcaagaagatacgtcttttgggggcaacctcgggcgagcagtcttccaggccaagaagcgggttctcgaacctctcggtctggttgaggaaggcgctaagacggctcctggaaagaaacgtccggtagagcagtcgccacaagagccagactcctcctcgggcatcggcaagacaggccagcagcccgctaaaaagagactcaattttggtcagactggcgactcagagtcagtccccgatccacaacctctcggagaacctccagcaacccccgctgctgtgggacctactacaatggcttcaggcggtggcgcaccaatggcagacaataacgaaggcgccgacggagtgggtaatgcctcaggaaattggcattgcgattccacatggctgggcgacagagtcatcaccaccagcacccgcacctgggccttgcccacctacaataaccacctctacaagcaaatctccagtgcttcaacgggggccagcaacgacaaccactacttcggctacagcaccccctgggggtattttgatttcaacagattccactgccacttttcaccacgtgactggcagcgactcatcaacaacaattggggattccggcccaagagactcaacttcaaactcttcaacatccaagtcaaggaggtcacgacgaatgatggcgtcacaaccatcgctaataaccttaccagcacggttcaagtcttctcggactcggagtaccagcttccgtacgtcctcggctctgcgcaccagggctgcctccctccgttcccggcggacgtgttcatgattccgcaatacggctacctgacgctcaacaatggcagccaagccgtgggacgttcatccttttactgcctggaatatttcccttctcagatgctgagaacgggcaacaactttaccttcagctacacctttgaggaagtgcctttccacagcagctacgcgcacagccagagcctggaccggctgatgaatcctctcatcgaccaatacctgtattacctgaacagaactcaaaatcagtccggaagtgcccaaaacaaggacttgctgtttagccgtgggtctccagctggcatgtctgttcagcccaaaaactggctacctggaccctgttatcggcagcagcgcgtttctaaaacaaaaacagacaacaacaacagcaattttacctggactggtgcttcaaaatataacctcaatgggcgtgaatccatcatcaaccctggcactgctatggcctcacacaaagacgacgaagacaagttctttcccatgagcggtgtcatgatttttggaaaagagagcgccggagcttcaaacactgcattggacaatgtcatgattacagacgaaggggaaattaaagccactaaccctgtggccaccgaaagatttgggaccgtggcagtcaatttccagagcagcagcacagaccctgcgaccggagatgtgcatgctatgggagcattacctggcatggtgtggcaagatagagacgtgtacctgcagggtcccatttgggccaaaattcctcacacagatggacactttcacccgtctcctcttatgggcggctttggactcaagaacccgcctcctcagatcctcatcaaaaacacgcctgttcctgcgaatcctccggcggagttttcagctacaaagtttgcttcattcatcacccaatactccacaggacaagtgagtgtggaaattgaatgggagctgcagaaagaaaacagcaagcgctggaatcccgaagtgcagtacacatccaattatgcaaaatctgccaacgttgattttactgtggacaacaatggactttatactgagcctcgccccattggcacccgttaccttacccgtcccctg

SEQ ID NO: 674 - DNA, 2208 bp, Artificial Sequence
  Description of Artificial Sequence: Synthetic polynucleotide
atggctgccgatggttatcttccagattggctcgaggacaacctctctgagggcattcgcgagtggtgggacttgaaacctggagccccgaaacctaaagccaaccagcaaaagcaggacgacggccggggtctggtgcttcctggctacaagtacctcggacccttcaacggactcgacaagggggagcccgtcaacgcggcggacgcagcggccctcgagcacgacaaggcctacgaccagcagctcaaagcgggtgacaatccgtacctgcggtataaccacgccgacgccgagtttcaggagcgtctgcaagaagatacgtcttttgggggcaacctcgggcgagcagtcttccaggccaagaagcgggttctcgaaccttttggtctggttgaggaaggcgctaagacggctcctggaaagaaacgtccggtagagcagtcgccacaagagccagactcctcctcgggcatcggcaagacaggccagcagcccgctaaaaagagactcaattttggtcagactggcgactcagagtcagtccccgacccacaacctctcggagaacctccagcaacccccgctgctgtgggacctactacaatggcttcaggcggtggcgcaccaatggcagacaataacgaaggcgccgacggagtgggtaatgcctcaggaaattggcattgcgattccacatggctgggcgacagagtcatcaccaccagcacccgcacctgggccttgcccacctacaataaccacctctacaagcaaatctccagtgcttcaacgggggccagcaacgacaaccactacttcggctacagcaccccctgggggtattttgatttcaacagattccactgccacttttcaccacgtgactggcagcgactcatcaacaacaattggggattccggcccaagagactcaacttcaagctcttcaacatccaagtcaaggaggtcacgacgaacgatggcgtcacgaccatcgctaataaccttaccagcacggttcaagtcttctcggattcagagtaccaactgccgtacgtcctcggctctgcgcaccagggctgcctccctccgttcccggcggacgtgtttatgattccgcagtacggctacctaacgctcaacaatggcagccaggccgtgggacgttcatccttttactgcccggaatatttcccttctcagatgctgagaacgggcaacaactttaccttcagctacacctttgaggaagtgcctttccacagcagctacgcgcacagccagagcctggaccggctgatgaatcctctcatcgaccaatacctgtattacctgaacagaactcaaaatcagtccggaagtgcccaaaacaaggacttgctgtttagccgtgggtctccagctggcatgtctgttcagcccaaaaactggctacctggaccctgttatcggcagcagcgcgtttctaaaacaaaaacagacaacaacaacagcaattttacctggactggtgcttcaaaatataacctcaatgggcgtgaatccatcatcaaccctggcactgctatggcctcacacaaagacgacaaagacaagttctttcccatgagcggtgtcatgatttttggaaaagagagcgccggagcttcaaatactgcattggacaatgtcatgatcacagatgaagaggaaattaaagccactaaccctgtggccaccgaaagatttgggaccgtggcagtcaatttccagagcagcaacacagaccccgcgaccggagatgtgcatgttatgggagccttacctggcatggtgtggcaagacagagacgtatacctgcagggtcccatttgggccaaaattcctcacacggatggacactttcacccgtctcctctcatgggcggctttggacttaagcacccgcctcctcaaatcctcatcaaaaacacgcctgttcctgcgaatcctccggcagagttttcggctacaaagtttgcttcattcatcacccagtactccacaggacaagtgagtgtggaaattgaatgggagctgcagaaagaaaacagcaagcgctggaatcccgaagtgcagtacacatccaattatgcaaaatctgccaacgttgatttcactgtggacaacaatggactttatactgagcctcgccccattggcacccgttaccttacccgtcccttg

SEQ ID NO: 675 - DNA, 2208 bp, Artificial Sequence
  Description of Artificial Sequence: Synthetic polynucleotide
atggctgccgatggttatcttccagattggctcgaggacaacctctctgagggcattcgcgagtggtgggacttgaaacctggagccccgaaacctaaagccaaccagcaaaagcaggacgacggccggggtctggtgcttcctggctacaagtacctcggacccttcaacggactcgacaagggggagcccgtcaacgcggcggacgcagcggccctcgagcacgacaaggcctacgaccagcagctcaaagcgggtgacaatccgtacctgcggtataaccacgccgacgccgagtttcaggagcgtctacaagaagatacgtcttttgggggcaacctcgggcgagcagtcttccaggccaagaagcgggttctcgaaccttttggtctggttgaggaaggcgctaagacggctcctggaaagaaacgtccggtagagcagtcgccacaagagccagactcctcctcgggcatcggcaagacaggccagcagcccgctaaaaagagactcaattttggtcagactggcgactcagagtcagtccccgacccacaacctctcggagaacctccagcaacccccgctgctgtgggacctactacaatggcttcaggcggtggcgcaccaatggcagacaataacgaaggcgccgacggagtgggtaatgcctcaggaaattggcattgcgattccacatggctgggcgacagagtcatcaccaccagcacccgcacctgggccttgcccacctacaataaccacctctacaagcaaatctccagtgcttcaacgggggccagcaacgacaaccactacttcggctacagcaccccctgggggtattttgatttcaacagattccactgccacttttcaccacgtgactggcagcgactcatcaacaacaattggggattccggcccaagagactcaacttcaagctcttcaacatccaagtcaaggaggtcacgacgaacgatggcgtcacgaccatcgctaataaccttaccagcacggttcaagtcttctcggattcagagtaccaactgccgtacgtcctcggctctgcgcaccagggctgcctccctccgttcccggcggacgtgttcatgattccgcagtacggctacctaacgctcaacaatggcagccaggccgtgggacgttcatccttttactgcctggaatatttcccttctcagatgctgagaacgggcaacaactttaccttcagctacacctttgaggaagtgcctttccacagcagctacgcgcacagccagagcctggaccggctgatgaatcctctcatcgaccaatacctgtattacctgaacagaactcaaaatcagtccggaagtgcccaaaacaaggacttgctgtttagccgtgggtctccagctggcatgtctgttcagcccaaaaactggctacctggaccctgttatcggcagcagcgcgtttctaaaacaaaaacagacaacaacaacagcaattttacctggactggtgcttcaaaatataacctcaatgggcgtgaatccatcatcaaccctggcactgctatggcctcacacaaagacgacaaagacaagttctttcccatgagcggtgtcatgatttttggaaaagagagcgccggagcttcaaatactgcattggacaatgtcatgatcacagatgaagaggaaattaaagccactaaccctgtggccaccgaaagatttgggaccgtggcagtcaatttccagagcagcgacacagaccccgcgaccggagatgtgcatgttatgggagccttacctggcatggtgtggcaagacagagacgtatacctgcagggtcccatttgggccaaaattcctcacacggatggacactttcacccgtctcctctcatgggcggctttggacttaagcacccgcctcctcaaatcctcatcaaaaacacgcctgttcctgcgaatcctccggcagagttttcggctacaaagtttgcttcattcatcacccagtactccacaggacaagtgagtgtggaaattgaatgggagctgcagaaagaaaacagcaagcgctggaatcccgaagtgcagtacacatccaattatgcaaaatctgccaacgttgatttcactgtggacaacaatggactttatactgagcctcgccccattggcacccgttaccttacccgtcccttg

SEQ ID NO: 676 - DNA, 2208 bp, Artificial Sequence
  Description of Artificial Sequence: Synthetic polynucleotide
atggctgccgatggttatcttccagattggctcgaggacaacctctctgagggcattcgcgagtggtgggacttgaaacctggagccccgaaacctaaagccaaccagcaaaagcagggcgacggccggggtctggtgcttcctggctacaagtacctcggacccttcaacggactcgacaagggggagcccgtcaacgcggcggacgcagcggccctcgagcacgacaaggcctacgaccagcagctcaaagcgggtgacaatccgtacctgcggtataaccacgccgacgccgagtttcaggagcgtctgcaagaagatacgtcttttgggggcaacctcgggcgagcagtcttccaggccaagaagcgggttctcgaaccttttggtctggttgaggaaggcgctaagacggctcctggaaagaaacgtccggtagagcagtcgccacaagagccagactcctcctcgggcatcggcaagacaggccagcagcccgctaaaaagagactcaattttggtcagactggcgactcagagtcagtccccgacccacaacctctcggagaacctccagcaacccccgctgctgtgggacctactacaatggcttcaggcggtggcgcaccaatggcagacaataacgaaggcgccgacggagtgggtaatgcctcaggaaattggcattgcgattccacatggctgggcgacagagtcatcaccaccaacactcgcacctgggccttgcccacctacaataaccacctctacaagcaaatctccagtgcttcaacgggggccagcaacgacaaccactacttcggctacagcaccccctgggggtattttgatttcaacagattccactgccacttttcaccacgtgactggcagcgactcatcaacaacaattggggattccggcccaagagactcaacttcaagctcttcaacatccaagtcaaggaggtcacgacgaacgatggcgtcacgaccatcgctaataaccttaccagcacggttcaagtcttctcggattcagagtaccaactgccgtacgtcctcggctctgcgcaccagggctgcctccctccgttcccggcggacgtgttcatgattccgcagtacggctacctaacgctcaacaatggcagccaggccgtgggacgttcatccttttactgcctggaatatttcccttctcagatgctgagaacgggcaacaactttaccttcagctacacctttgaggaagtgcctttccacagcagttacgggcacagccagagcctggaccggctgatgaatcttctcatcgaccaatacctgtattacctgaacagaactcaaaatcagtccggaagtgcccaaaacaaggacttgctgtttagccgtgggtctccagctggcatgtttgttcagcccaaaaactggctacctggaccctgttatcggcagcagcgcgtttctaaaacaaaaacagacaacaacaacagcaattttacctggactggtgcttcaaaatataacctcaatgggcgtgaatccatcatcaaccctggcactgctatggcctcacacaaagacgacgaagacaagttctttcccatgagcggtgtcatgatttttggaaaagagagcgccggagcttcaaatactgcattggacaatgtcatgatcacagatgaagaggaaattaaagccactaaccctgtggccaccgaaagatttgggaccgtggcagtcaatttccagagcagcagcacagaccccgcgaccggagatgtgcatgttatgggagccttacctggcatggtgtggcaagacagagacgtatacctgcagggtcccatttgggccaaaattcctcacacggatggacactttcacccgtctcctctcatgggcggctttggacttaagcacccgcctcctcaaatcctcatcaaaaacacgcctgttcctgcgaatcctccggcagagttttcggctacaaagtttgcttcattcatcacccagtactccacaggacaagtgagtgtggaaattgaatgggagctgcagaaagaaaacagcaagcgctggaatcccgaagtgcagtacacatccaattatgcaaaatctgccaacgttgatttcactgtggacaacaatggactttatactgagcctcgccccattggcacccgttaccttacccgtcccttg

SEQ ID NO: 677 - DNA, 2208 bp, Artificial Sequence
  Description of Artificial Sequence: Synthetic polynucleotide
atggctgccgatggttatcttccagattggctcgaggacaacctctctgagggcattcgcgagtggtgggacttgaaacctggagccccgaaacctaaagccaaccagcaaaagcaggacgacggccggggtctggtgcttcctggctacaagtacctcggacccttcaacggactcgacaagggggagcccgtcaacgcggcggacgcagcggccctcgagcacgacaaggcctacgaccagcagctcaaagcgggtgacaatccgtacctgcggtataaccacgccgacgccgagtttcaggagcgtctgcaagaagatacgtcttttgggggcaacctcgggcgagcagtcttccaggccaagaagcgggttctcgaaccttttggtctggttgaggaaggcgctaagacggctcctggaaagaaacgtccggtagagcagtcgccacaagagccagactcctcctcgggcatcggcaagacaggccagcagcccgctaaaaagagactcaattttggtcagactggcgactcagagtcagtccccgacccacaacctctcggagaacctccagcaacccccgctgctgtgggacctactacaatggcttcaggcggtggcgcaccaatggcagacaataacgaaggcgccgacggagtgggtaatgcctcaggaaattggcattgcgattccacatggctgggcgacagagtcatcaccaccaacacccgcacctgggccttgcccacctacaataaccacctctacaagcaaatctccagtgcttcaacgggggccagcaacgacaaccactacttcggctacagcaccccctgggggtattttgatttcaacagattccactgccacttttcaccacgtgactggcagcgactcatcaacaacaattggggattccggcccaagagactcaacttcaagctcttcaacatccaagtcaaggaggtcacgacgaacgatggcgtcacgaccatcgctaataaccttaccagcacggttcaagtcttctcggattcagagtaccaactgccgtacgtcctcggctctgcgcaccagggctgcctccctccgttcccggcggacgtgttcatgattccgcagtacggctacctaatgctcaacaatggcagccaggccgtgggacgttcatccttttactgcctggaatatttcccttctcagatgctgagaacgggcaacaactttaccttcagctacacctttgaggaagtgcctttccacagcagctacgcgcacagccagagcctggaccggctgatgaatcctctcatcgaccaatacctgtattacctgaacagaactcaaaatcagtccggaagtgcccaaaacaaggacttgctgtttagccgtgggtctccagctggcatgtctgttcagcccaaaaactggctacctggaccctgttatcggcagcagcgcgtttctaaaacaaaaacagacaacaacaacagcaattttacctggactggtgcttcaaaatataacctcaatgggcgtgaatccatcatcaaccctggcactgctatggcctcacacaaagacgacgaagacaagttctttcccatgagcggtgtcatgatttttggaaaagagagcgccggagcttcaaatactgcattggacaatgtcatgatcacagatgaagaggaaattaaagccactaaccctgcggccaccgaaagatttgggaccgtggcagtcaatttccagagcagcagcacagaccccgcgaccggagatgtgcatgttatgggagccttacctggcatggtgtggcaagacagagacgtatacctgcagggtcccatttgggccaaaattcctcacacggatggacactttcacccgtctcctctcatgggcggctttggacttaagcacccgcctcctcaaatcctcatcaaaaacacgcctgttcctgcgaatcctccggcagagttttcggctacaaagtttgcttcattcatcacccagtactccacaggacaagtgagtgtggaaattgaatgggagctgcagaaagaaaacagcaagcgctggaatcccgaagtgcagtacacatccaattatgcaaaatctgccaacgttgatttcactgtggacaacaatggactttatactgagcctcgccccattggcacccgttaccttacccgtcccttg

SEQ ID NO: 678 - DNA, 2208 bp, Artificial Sequence
  Description of Artificial Sequence: Synthetic polynucleotide
atggctgccgatggttatcttccagattggctcgaggacaacctctctgagggcattcgcgagtggtgggacttgaaacctggagccccgaaacctaaagccaaccagcaaaagcaggacgacggccggggtctggtgcttcctggctacaagtacctcggacccttcaacggactcgacaagggggagcccgtcaacgcggcggacgcagcggccctcgagcacgacaaggcctacgaccagcagctcaaagcgggtgacaatccgtacctgcggtataaccacgccgacgccgagtttcaggagcgtctgcaagaagatacgtcttttgggggcaacctcgggcgagcagtcttccaggccaagaagcgggttctcgaaccttttggtctggttgaggaaggcgctaagacggctcctggaaagaaacgtccggtagagcagtcgccacaagagccagactcctcctcgggcatcggcaagacgggccagcagcccgctaaaaagagactcaattttggtcagactggcgactcagagtcagtccccgacccacaacctctcggagaacctccagcaacccccgctgctgtgggacctactacaatggcttcaggcggtggcgcaccaatggcagacaataacgaaggcgccgacggagtgggtaatgcctcaggaaattggcattgcgattccacatggctgggcgacagagtcatcaccaccagcacccgcacctgggccttgcccacctacaataaccacctctacaagcaaatctccagtgcttcaacgggggccagcaacgacaaccactacttcggctacagcaccccctgggggtattttgatttcaacagattccactgccacttttcaccacgtgactggcagcgactcatcaacaacaattggggattccggcccaagagactcaacttcaagctcttcaacatccaagtcaaggaggtcacgacgaacgatggcgtcacgaccatcgctaataaccttaccagcacggttcaagtcttctcggattcagagtaccaactgccgtacgtcctcggctctgcgcaccagggctgcctccctccgttcccggcggacgtgttcatgattccgcagtacggctacctaacgctcaacaatggcagccaggccgtgggacgttcatccttttactgcctggaatatttcccttctcagatgctgagaacgggcaacaactttaccttcagctacacctttgaggaagtgcctttccacagcagctacgcgcacagccagagcctggaccggctgatgaatcctctcatcgaccaatacctgtattacctgaacagaactcaaaatcagtccggaagtgcccaaaacaaggacttgctgtttagccgtgggtctccagctggcatgtccgttcagcccaaaaactggctacctggaccctgttatcggcagcagcgcgtttctaaaacaaaaacagacaacaacaacagcaattttacctggactggtgcttcaaaatataacctcaatgggcgtgaatccatcatcaaccctggcactgctatggcctcacacaaagacgacgaagacaagttctttcccatgagcggtgtcatgatttttggaaaagagagcgccggagcttcaaatactgcattggacaatgtcatgatcacagatgaagaggaaattaaagccactaaccctgtggccaccgaaagatttgggaccgtggcagtcaatttccagagcagcagcacagaccccgcgaccggagatgtgcatgttatgggagccttacctggcatggtgtggcaagacagagacgtatacctgcagggtcccatttgggccaaaattcctcacacggatggacactttcacccgtctcctctcatgggcggctttggacttaagcacccgcctcctcaaatcctcatcaaaaacacgcctgttcctgcgaatcctccggcagagttttcggctacaaagtttgcttcattcatcacccagtactccacaggacaagtgagtgtggaaattgaatgggagctgcagaaagaaaacagcaagcgctggaatcccgaagtgcagtacacatccaattatgcaaaatctgccaacgttgatttcactgtggacaacaatggactttatactgagcctcgccccattggcacccgttaccttacccgtcccttg

SEQ ID NO: 679 - DNA, 2208 bp, Artificial Sequence
  Description of Artificial Sequence: Synthetic polynucleotide
  modified_base (305)..(305): a, c, g, or t
atggctgccgatggttatcttccagattggctcgaggacaacctctctgagggcattcgcgagtggtgggacttgaaacctggagccccgaaacctaaagccaaccagcaaaagcaggacgacggccggggtctggtgcttcctggctacaagtacctcggacccttcaacggactcgacaagggggagcccgtcaacgcggcggacgcagcggccctcgagcacgacaaggcctacgaccagcagctcaaagcgggtgacaatccgtacctgcggtataaccacgccgacgccgagtttcaggngcgtctgcaagaagatacgtcttttgggggcaacctcgggcgagcagtcttccaggccaagaagcgggttctcgaaccttttggtctggttgaggaaggcgctaagacggctcctggaaagaaacgtccggtagagcagtcgccacaagagccagactcctcctcgggcatcggcaagacaggccagcagcccgctaaaaagagactcaattttggtcagactggcgactcagagtcagtccccgacccacaacctctcggagaacctccagcaacccccgctgctgtgggacctactacaatggcttcaggcggtggcgcaccaatggcagacaataacgaaggcgccgacggagtgggtaatgcctcaggaaattggcattgcgattccacatggctgggcggcagagtcatcaccaccagcacccgcacctgggccttgcccacctacaataaccacctctacaagcaaatctccagtgcttcaacgggggccagcaacgacaaccactacttcggccacagcaccccctgggggtattttgatttcaacagattccactgccacttttcaccacgtgactggcagcgactcatcaacaacaattggggattccggcccaagagactcaacttcaagctcttcaacatccaagtcaaggaggtcacgacgaacgatggcgtcacgaccatcgctaataaccttaccagcacggttcaagtcttctcggattcagagtaccaactgccgtacgtcctcggctctgcgcaccagggctgcctccctccgtccccggcggacgtgttcatgattccgcagtacggctacctaacactcaacaatggcagccaggccgtgggacgttcatccttttactgcctggaatatttcccttctcagatgctgagaacgggcaacaactttaccttcagctacacctttgaggaagtgcctttccacagcagctacgcgcacagccagagcctggaccggctgatgaatcctctcatcgaccaatacctgtattacctgaacagaactcaaaatcagtccggaagtgcccaaaacaaggacttgctgtttagccgtgggtctccagctggcatgtctgttcagcccaaaaactggctacctggaccctgttatcggcagcagcgcgtttctaaaacaaaaacagacaacaacaacagcaattttacctggactggtgcttcaaaatataacctcaatgggcgtgaatccatcatcaaccctggcactgctatggcctcacacaaagacgacaaagacaagttctttcccatgagcggtgtcatgatttttggaaaagagagcgccggagcttcaaatactgcattggacaatgtcatgatcacagatgaagaggaaattaaagccactaaccctgtggccaccgaaagatttgggaccgtggcagtcaatttccagagcagcaacacagaccccgcgaccggagatgtgcatgttatgggagccttacctggcatggtgtggcaagacagagacgtatacctgcagggtcccatttgggccaaaattcctcacacggatggacactttcacccgtctcctctcatgggcggctttggacttaagcacccgcctcctcaaatcctcatcaaaaacacgcctgttcctgcgaatcctccggcagagttttcggctacaaagtttgcttcattcatcacccagtactccacaggacaagtgagtgtggaaattgaatgggagctgcagaaagaaaacagcaagcgctggaatcccgaagtgcagtacacatccaattatgcaaaatctgccaacgttgatttcactgtggacaacaatggactttatactgagcctcgccccattggcacccgttaccttacccgtcccttg

SEQ ID NO: 680 - DNA, 2208 bp, Artificial Sequence
  Description of Artificial Sequence: Synthetic polynucleotide
atggctgccgatggttattttccagattggctcgaggacaacctttctgagggcattcgcgagtggtgggacttgaaacctggagccccgaaacctaaagccaaccagcaaaagcaggacgacggccggggtctggtgcttcctggctacaagtacctcggacccttcaacggactcgacaagggggagcccgtcaacgcggcggacgcagcggccctcgagcacgacaaggcctacgaccagcagctcaaagcgggtgacaatccgtacctgcggtataaccacgccgacgccgagtttcaggagcgtctgcaagaagatacgtcttttgggggcaacctcgggcgagcagtcttccaggccaagaagcgggttctcgaaccttttggtctggttgaggaaggcgctaagacggctcctggaaagaaacgtccggtagagcagtcgccacaagagccagactcctcctcgggcatcggcaggacaggccagcagcccgctaaaaagagactcaattttggtcagactggcgactcagagtcagtccccgacccacaacctctcggagaacctccagcgacccccgctgctgtgggacctactacaatggcttcaggcggtggcgcaccaatggcagacaataacgaaggtgccgacggagtgggtaatgcctcaggaaattggcattgcgattccacatggctgggcgacagagtcatcaccaccagcacccgcacctgggccttgcccacctacaataaccacctctacaagcaaatctccagtgcttcaacgggggccagcaacgacaaccactacttcggctacagcaccccctgggggtattttgatttcaacagattccactgccacttttcaccacgtgactggcagcgactcatcaacaacaattggggattccggcccaagagactcaacttcaagctcttcaacatccaagtcaaggaggtcacgacgaacgatggcgtcacgaccatcgctaataaccttaccagcacggttcaagtcttctcggattcagagtaccaactgccgtacgtcctcggctctgcgcaccagggctgcctccctccgttcccggcggacgtgttcatgattccgcagtacggctacctaacgctcaacaatggcagccaggccgtgggacgttcatccttttactgcctggaatatttcccttctcagatgctgagaacgggcaacaactttaccttcagctacacctttgaggaagtgcctttccacagcagctacgcgcacagccagagcctggaccggctgatgaatcctctcatcgaccaatacctgtattacctgaacagaactcaaaatcagtccggaagtgcccaaaacaaggacttgctgtttagccgtgggtctccagctggcatgtctgttcagcccaaaaactggctacctggaccctgttatcggcagcagcgcgtttctaaaacaaaaacagacaacaacaacagcaattttacctggactggtgcttcaaaatataacctcaatgggcgtgaatccatcatcaaccctggcactgctatggcctcacacaaagacgacgaagacaagttctttcccatgagcggtgtcatgatttttggaaaagagagcgccggagcttcaaatactgcattggacaatgtcatgatcacagatgaagaggaaattaaagccactaaccctgtggccaccgaaagatttgggaccgtggcagtcaatttccagagcagcagcccagaccccgcgaccggagatgtgcatgttatgggagccttacctggcatggtgtggcaagacagagacgtatacctgcagggtcccatttgggccaaaattcctcacacggatggacactttcacccgtctcctctcatgggcggctttggacttaagcacccgcctcctcaaatcctcatcaaaaacacgcctgttcctgcgaatcctccggcagagttttcggctacaaagtttgcttcattcatcacccagtactccacaggacaagtgagtgtggaaattgaatgggagctgcagaaagaaaacagcaagcgctggaatcccgaagtgcagtacacatccaattatgcaaaatctgccaacgttgatttcactgtggacaacaatggactttatagtgagcctcgccccattggcacccgttaccttacccgtcccttg

SEQ ID NO: 681 - DNA, 2208 bp, Artificial Sequence
  Description of Artificial Sequence: Synthetic polynucleotide
atggctgccgatggttatcttccagattggctcgaggacaacctctctgagggcattcgcgagtggtgggacttgaaacctggagccccgaaacctaaagccaaccagcaaaagcaggacgacggccggggtctggtgcttcctggctacaagtacctcggacccttcaacggactcgacaagggggagcccgtcaacgcggcggacgcagcggccctcgagcacgacaaggcctacgaccagcagctcaaagcgggtgacaatccgtacctgcggtataaccacgccgacgccgagtttcaggagcgtctgcaagaagatacgtcttttgggggcaacctcgggcgagcagtcttccaggccaagaagcgggttctcgaaccttttggtctggttgaggaaggcgctaagacggctcctggaaagaaacgtccggtagagcagtcgccacaagagccagactcctcctcgggcatcggcaagacaggccagcagcccgctaaaaagagactcaattttggtcagactggcgactcagagtcagtccccgacccacaacctctcggagaacctccagcaacccccgctgctgtgggacctactacaatggcttcaggcggtggcgcaccaatggcagacaataacgaaggcgccgacggagtgggtaatgcctcaggaaattggcattgcgattccacatggctgggcgacagagtcatcaccaccagcacccgcacctgggccttgcccacctacaataaccacctctacaagcaaacctccagtgcttcaacgggggccagcaacgacaaccactacttcggctacagcaccccctgggggtattttgatttcaacagattccactgccacttttcaccacgtgactggcagcgactcatcaacaacaattggggattccggcccaagagactcaacttcaagctcttcaacatccaagtcaaggaggtcacgacgaacgatggcgtcacgaccatcgctaataaccttaccagcacggttcaagtcttctcggattcagagtaccaactgccgtacgtcctcggctctgcgcaccagggctgcctccctccgttcccggcggacgtgttcatgattccgcagtacggctacctaacgctcaacaatggcagccaggccgtgggacgttcatccttttactgcctggaatatttcccttctcagatgctgagaacgggcaacaactttaccttcagctacacctttgaggaagtgcctttccacagcagctacgcgcacagccagagcctggaccggctgatgaatcctctcatcgaccaatacctgtattacctgaacagaactcaaaatcagtccggaagtgcccaaaacaaggacttgctgtttagccgtgggtctccagctggcatgtctgttcagcccaaaaactggctacctggaccctgttatcggcagcagcgcgtttctaaaacaaaaacagactacaacaacagcaattttacctggactggtgcttcaaaatataacctcaatgggcgtgaatccatcatcaaccctggcactgctatggcctcacacaaagacgacgaagacaagttctttcccatgagcggtgtcatgatttttggaaaagagagcgccggagcttcaaatactgcattggacaatgtcatgatcacagatgaagaggaaattaaagccactaaccctgtggccaccgaaagatttgggaccgtggcagtcaatttccagagcagcagcacagaccccgcgaccggagatgtgcatgttatgggagccttacctggcatggtgtggcaagacagagacgtatacctgcagggtcccatttgggccaaaattcctcacacggatggacactttcacccgtctcctctcatgggcggctttggacttaagcacccgcctcctcaaatcctcatcaaaaacacgcctgttcctgcgaatcctccggcagagttttcggctacaaagtttgcttcattcatcacccagtactccacaggacaagtgagtgtggaaattgaatgggagctgcagaaagaaaacagcaagcgctggaatcccgaagtgcagtacacatccaattatgcaaaatctgccaacgttgatttcactgtggacaacaatggactttatactgagcctcgccccattggcacccgttaccttacccgtcccttg

SEQ ID NO: 682 - DNA, 2208 bp, Artificial Sequence
  Description of Artificial Sequence: Synthetic polynucleotide
atggctgccgatggttatcctccagattggctcgaggacaacctctctgagggcattcgcgagtggtgggacttgaaacctggagtcccgaaacctaaagccaaccagcaaaagcaggacgacggccggggtctggtgcttcctggctacaagtacctcggacccttcaacggactcgacaagggggagcccgtcaacgcggcggacgcagcggccctcgagcacgacaaggcctacgaccagcagctcaaagcgggtgacaatccgtacctgcggtataaccacgccgacgccgagtttcaggagcgtctgcaagaagatacgtcttttgggggcaacctcgggcgagcagtcttccaggccaagaagcgggttctcgaaccttttggtctggttgaggaaggcgctaagacggctcctggaaagaaacgtccggtagagcagtcgccacaagagccagactcctcctcgggcatcggcaagacaggccagcagcccgctaaaaagagactcaattttggtcagactggcgactcagagtcagtccccgacccacaacctctcggagaacctccagcaacccccgctgctgtgggacctactacaatggcttcaggcggtggcgcaccaatggcagacaataacgaaggcgccgacggagtgggtaatgcctcaggaaattggcattgcgattccacatggctgggcgacagagtcatcaccaccagcacccgcacctgggccttgcccacctacaataaccacctctacaagcaaatctccagtgcttcaacgggggccagcaacgacaaccactacttcggctacagcaccccctgggggtattttgatttcaacagattccactgccacttttcaccacgtgactggcagcgactcatcaacaacaattggggattccggcccaagagactcaacttcaagctcttcaacatccaagtcaaggaggtcacgacgaacgatggcgtcacgaccatcgctaataaccttaccagcacggttcaagtcttctcggattcagagtaccaactgccgtacgtcctcggctctgcgcaccagggctgcctccctccgttcccggcggacgtgttcatgattccgcagtacggctacctaacgctcaacaatggcagccaggccgtgggacgttcatccttttactgcctggaatatttcccttctcagatgctgagaacgggcaacaactttaccttcagctacacctttgaggaagtgcctttccacagcagctacgcgcacagccagagcctggaccggctgatgaatcctctcatcgaccaatacctgtattacctgaacagaactcaaaatcagtccggaagtgcccaaaacaaggacttgctgtttagccgtgggtctccagctggcatgtctgttcagcccaaaaactggctacctggaccctgttatcggcagcagcgcgtttctaaaacaaaaacagacaacaacaacagcaattttacctggactggtgcttcaaaatataacctcaatgggcgtgaatccatcatcaaccctggcactgctatggcctcacacaaagacgacgaagacaagttctttcccatgagcggtgtcatgatttttggaaaagagagcgccggagcttcaaatactgcattggacaatgtcatgatcacagatgaagaggaaattaaagccactaaccctgtggccaccgaaagatttgggaccgtggcagtcaatttccagagcagcagcacagaccccgcgaccggagatgtgcatgttatgggagccttacctggcatggtgtggcaagacagagacgtatacctgcagggtcccatttgggccaaaattcctcacacggatggacactttcacccgtctcctctcatgggcggctttggacttaagcacccgcctcctcaaatcctcatcaaaaacacgcctgttcctgcgaatcctccggcagagttttcggctacaaagtttgcttcattcatcacccagtactccacaggacaagtgagtgtggaaattgaatgggagctgcagaaagaaaacagcaagcgctggaatcccgaagtgcagtacacatccaattatgcaaaatctgccaacgttgatttcactgtggacaacaatggactttatactgagcctcgccccattggcacccgttaccttacccgtcccttg

SEQ ID NO: 683 - DNA, 2196 bp, Artificial Sequence
  Description of Artificial Sequence: Synthetic polynucleotide
atggctgccgatggttatcttccagattggctcgaggacaacctctctgagggcattcgcgagtggtgggacttgaaacctggagccccgaaacctaaagccaaccagcaaaagcaggacgacggccggggtctggtgcttcctggctacaagtacctcggacccttcaacggactcgacaagggggagcccgtcaacgcggcggacgcagcggccctcgagcacgacaaggcctacgaccagcagctcaaagcgggtgacaatccgtacctgcggtataaccacgccgacgccgagtttcaggagcgtctgcaagaagatacgtcttttgggggcaacctcgggcgagcagtcttccaggccaagaagcgggttctcgaaccttttggtctggttgaggaaggcgctaagacggctcctggaaagaaacgtccggtagagcagtcgccacaagagccagactcctcctcgggcatcggcaagacaggccagcagcccgctaaaaagagactcaattttggtcagactggcgactcagagtcagtccccgacccacaacctctcggagaacctccagcaacccccgctgctgtgggacctactacaatggcttcaggcggtggcgcaccaatggcagacaataacgaaggcgccgacggagtgggtaatgcctcaggaaattggcattgcgattccacatggctgggcgacagagtcatcaccaccagcacccgcacctgggccttgcccacctacaataaccacctctacaagcaaatctccagtgcttcaacgggggccagcaacgacaaccactacttcggctacagcaccccctgggggtattttgatttcaacagattccactgccacttttcaccacgtgactggcagcgactcatcaacaacaattggggattccggcccaagagactcaacttcaagctcttcaacatccaagtcaaggaggtcacgacgaacgatggcgtcacgaccatcgctaataaccttaccagcacggttcaagccttctcggattcagagtaccaactgccgtacgtcctcggctctgcgcaccagggctgcctccctccgttcccggcggacgtgttcatgattccgcagtacggctacctaacgctcaacaatggcagccaggccgtgggacgttcatccttttactgcctggaatatttcccttctcagatgctgagaacgggcaacaactttaccttcagctacacctttgaggaagtgcctttccacagcagctacgcgcacagccagagcctggaccggctgatgaatcctctcatcgacccatacctgtattacctgaacagaactcaaaatcagtccggaagtgcccaaaacaaggacttgctgtttagccgtgggtctccagctggcatgtctgttcagcccaaaaactggctacctggaccctgttatcggcagcagcgcgtttctaaaacaaaaacagacaacaacaacagcaattttacctggactggtgcttcaaaatataacctcaatgggcgtgaatccatcatcaaccctggcactgctatggcctcacacaaagacgacgaagacaagttctttcccatgagcggtgtcatgatttttggaaaagagagcgccggagcttcaaatactgcattggacaatgtcatgatcacagatgaagaggaaattaaagccactaaccctgtggccaccgaaagatttgggaccgtggcagtcaatttccagagcagcagcacagaccccgcgaccggagatgtgcatgttatgggagccttacctggcatggtgtggcaagacagagacgtatacctgcagggtcccatttgggccaaaattcctcacacggatggacactttcacccgtctcctctcatgggcggctttggacttaagcacccgcctcctcaaatcctcatcaaaaacacgcctgttcctgcgaatcctccggcagagttttcggctacaaagtttgcttcattcatcacccagtactccacaggacaagtgagtgtggaaattgaatgggagctgcagaaagaaaacagcaagcgctggaatcccgaagtgcagtacacatccaattatgcaaaatctgccaacgttgatttcactgtggacaacaatggactttatactgagcctcgccccattggcacccgttacctt

SEQ ID NO: 684 - DNA, 2208 bp, Artificial Sequence
  Description of Artificial Sequence: Synthetic polynucleotide
atggctgccgatggttatcttccagattggctcgaggacaacctctctgagggcattcgcgagtggtgggacttgaaacctggagccccgaaacctaaagccaaccagcaaaagcaggacgacggccggggtctggtgcttcctggctacaagtacctcggacccttcaacggactcgacaagggggagcccgtcaacgcggcggacgcagcggccctcgagcacgacaaggcctacgaccagcagctcaaagcgggtgacaatccgtacctgcggtataaccacgccgacgccgagtttcaggagcgtctgcaagaagatacgtcttttgggggcaacctcgggcgagcagtcttccaggccaagaagcgggttctcgaaccttttggtctggttgaggaaggcgctaagacggctcctggaaagaaacgtccggtagagcagtcgccacaagagccagactcctcctcgggcatcggcaagacaggccagcagcccgctaaaaagagactcaattttggtcagactggcgactcagagtcagtccccgacccacaacctctcggagaacctccagcaacccccgctgctgtgggacctactacaatggcttcaggcggtggcgcaccaatggcagacaataacgaaggcgccgacggagtgggtaatgcctcaggaaattggcattgcgattccacatggctgggcgacagagtcatcaccaccagcacccgcacctgggccttgcccacctacaataaccacctctacaagcaaatctccagtgcttcaacgggggccagcaacgacaaccactacttcggctacagcaccccctgggggtattttgatttcaacagattccactgccacttttcaccacgtgactggcagcgactcatcaacaacaattggggattccggcccaagagactcaacttcaagctcttcaacatccaagtcaaggaggtcacgacgaacgatggcgtcacgaccatcgctaataaccttaccagcacggttcaagtcttctcggattcagagtaccaactgccgtacgtcctcggctctgcgcaccagggctgcctccctccgttcccggcggacgtgttcatgattccgcagtacggctacctaacgctcaacaatggcagccaggccgtgggacgttcatccttttactgcctggaatatttcccttctcagatgctgagaacgggcaacaactttaccttcagctacacctttgaggaagtgcctttccacagcagctacgcgcacagccagagcctggaccggctgatgaatcctctcatcgaccaatacctgtattacctgaacagaactcaaaatcagtccggaagtgcccaaaacaaggacttgctgtttagccgtgggtctccagctggcatgtctgttcagcccaaaaactggctacctggaccctgttatcggcagcagcgcgtttctaaaacaaaaacagacaacaacaacagcaattttacctggactggtgcttcaaaatataacctcaatgggcgtgaatccatcatcaaccctggcactgctatggcctcacacaaagacgacgaagacaagttctttcccatgagcggtgtcatgatttttggaaaagagagcgccggagcttcaaatactgcattggacaatgtcatgatcacagatgaagaggaaattaaagccactaaccctgtggccaccgaaagatttgggaccgtggcagtcaatttccagagcagcagcacagaccccgcgaccggagatgtgcatgttatgggagccttacctggcatggtgtggcaagacagagacgtatacctgcagggtcccatttgggccaaaattcctcacacggatggacactctcacccgtctcctctcatgggcggctttggacttaagcacccgcctcctcaaatcctcatcaaaaacacgcctgttcctgcgaatcctccggcagagttttcggctacaaagtttgcttcattcatcacccagtactccacaggacaagtgagtgtggaaattgaatgggagctgcagaaagaaaacagcaagcgctggaatcccgaagtgcagtacacatccaattatgcaaaatctgccaacgttgatttcactgtggacaacaatggactttatactgagcctcgccccattggcacccgttaccttacccgtcccttg

SEQ ID NO: 685 - DNA, 2208 bp, Artificial Sequence
  Description of Artificial Sequence: Synthetic polynucleotide
atggctgccgatggttatcttccagattggctcgaggacaacctctctgagggcattcgcgagtggtgggacttgaaacctggagccccgaaacctaaagccaaccagcaaaagcaggacgacggccggggtctggtgcttcctggctacaagtacctcggacccttcaacggactcgacaagggggagcccgtcaacgcggcggacgcagcggccctcgagcacgacaaggcctacgaccagcagctcaaagcgggtgacaatccgtacctgcggtataaccacgccgacgccgagtttcaggagcgtctgcaagaagatacgtcttttgggggcaacctcgggcgagcagtcttccaggccaagaagcgggttctcgaaccttttggtctggttgaggaaggcgctaagacggctcctggaaagaaacgtccggtagagcagtcgccacaagagccagactcctcctcgggcatcggcaagacaggccagcagcccgctaaaaagagactcaattttggtcagactggcgactcagagtcagtccccgacccacaacctctcggagaacctccagcaacccccgctgctgtgggacctactacaatggcttcaggcggtggcgcaccaatggcagacaataacgaaggcgccgacggagtgggtaatgcctcaggaaattggcattgcgattccacatggctgggcgacagagtcatcaccaccagcacccgcacctgggccttgcccacctacaataaccacctctacaagcaaatctccagtgcttcaacgggggccagcaacgacaaccactacttcggctacagcaccccctgggggtattttgatttcaacagattccactgccacttttcaccacgtgactggcagcgactcatcaacaacaattggggattccggcccaagagactcaacttcaagctcttcaacatccaagtcaaggaggtcacgacgaacgatggcgtcacgaccatcgctaataaccttaccagcacggttcaagtcttctcggattcagagtaccaactgccgtacgtcctcggctctgcgcaccagggctgcctccctccgttcccggcggacgtgttcatgattccgcagtacggctacctaacgctcaacaatggcagccaggccgtgggacgttcatccttttactgcctggaatatttcccttctcagatgctgagaacgggcaacaactttaccttcagctacacctttgaggaagtgcctttccacagcagctacgcgcacagccagagcctggaccggctgatgaatcctctcatcgacctatacctgtattacctgaacagaactcaaaatcagtccggaagtgcccaaaacaaggacttgctgtttagccgtgggtctccagctggcatgtctgttcagcccaaaaactggctacctggaccctgttatcggcagcagcgcgtttctaaaacaaaaacagacaacaacaacagcaattttacctggactggtgcttcaaaatataacctcaatgggcgtgaatccatcatcaaccctggcactgctatggcctcacacaaagacgacgaagacaagttctttcccatgagcggtgtcatgatttttggaaaagagagcgccggaacttcaaatactgcattggacaatgtcatgatcacagatgaagaggaaattaaagccactaaccctgtggccaccgaaagatttgggaccgtggcagtcaatttccagagcagcagcacagaccccgcgaccggagatgtgcatgttatgggagccttacctggcatggtgtggcaagacagagacgtatacctgcagggtcccatttgggccaaaattcctcacacggatggacactttcacccgtctcctctcatgggcggctttggacttaagcacccgcctcctcaaatcctcatcaaaaacacgcctgttcctgcgaatcctccggcagagttttcggctacaaagtttgcttcattcatcacccagtactccacaggacaagtgagtgtggaaattgaatgggagctgcagaaagaaaacagcaagcgctggaatcccgaagtgcagtacacatccaattatgcaaaatctgccaacgttgatttcactgtggacaacaatggactttatactgagcctcgccccattggcacccgttaccttacccgtcccttg

SEQ ID NO: 686 - DNA, 2208 bp, Artificial Sequence
  Description of Artificial Sequence: Synthetic polynucleotide
atggctgccgatggttatcttccagattggctcgaggacagcctctctgagggcattcgcgagtggtgggacttgaaacctggagccccgaaacctaaagccaaccagcaaaagcaggacgacggccggggtctggtgcttcctggctacaagtacctcggacccttcaacggactcgacaagggggagcccgtcaacgcggcggacgcagcggccctcgagcacgacaaggcctacgaccagcagctcaaagcgggtgacaatccgtacctgcggtataaccacgccgacgccgagtttcaggagcgtctgcaagaagatacgtcttttgggggcaacctcgggcgagcagtcttccaggccaagaagcgggttctcgaaccttttggtctggttgaggaaggcgctaagacggctcctggaaagaaacgtccggtagagcagtcgccacaagagccagactcctcctcgggcatcggcaagacaggccagcagcccgctaaaaagagactcaattttggtcagactggcgactcagagtcagtccccgacccacaacctctcggagaacctccagcaacccccgctgctgtgggacctactacgatggcttcaggcggtggcgcaccaatggcagacaataacgaaggcgccgacggagtgggtaatgcctcaggaaattggcattgcgattccacatggctgggcgacagagtcatcaccaccagcacccgcacctgggccttgcccacctacaataaccacctctacaagcaaatctccagtgcttcaacgggggccagcaacgacaaccactacttcggctacagcaccccctgggggtattttgatttcaacagattccactgccacttttcaccacgtgactggcagcgactcatcaacaacaattggggattccggcccaagagactcaacttcaagctcttcaacatccaagtcaaggaggtcacgacgaacgatggcgtcacgaccatcgctaataaccttaccagcacggttcaagtcttctcggattcagagtaccaactgccgtacgtcctcggctctgcgcaccagggctgcctccctccgttcccggcggacgtgttcatgattccgcagtacggctacctaacgcccaacaatggcagccaggccgtgggacgttcatccttttactgcctggaatatttcccttctcagatgctgagaacgggcaacaactttaccttcagctacacctttgaggaagtgcctttccacagcagctacgcgcacagccagagcctggaccggctgatgaatcctctcatcgaccaataccagtattacctgaacagaactcaaaatcagtccggaagtgcccaaaacaaggacttgctgtttagccgtgggtctccagctggcatgtctgttcagcccaaaaactggctacctggaccctgttatcggcagcagcgcgtttctaaaacaaaaacagacaacaacaacagcaattttacctggactggtgcttcaaaatataacctcaatgggcgtgaatccatcatcaaccctggcactgctatggcctcacacaaagacgacgaagacaagttctttcccatgagcggtgtcatgatttttggaaaagagagcgccggagcttcaaatactgcattggacaatgtcatgatcacagatgaagaggaaattaaagccactaaccctgtggccaccgaaagatttgggaccgtggcagtcaatttccagagcagcagcacagaccccgcgaccggagatgtgcatgttatgggagccttacctggcatggtgtggcaagacagagacgtatacctgcagggtcccatttgggccaaaattcctcacacggatggacactttcacccgtctcctctcatgggcggctttggacttaagcacccgcctcctcaaatcctcatcaaaaacacgcctgttcctgcgaatcctccggcagagttttcggctacaaagtttgcttcattcatcacccagtactccacaggacaagtgagtgtggaaattgaatgggagctgcagaaagaaaacagcaagcgctggaatcccgaagtgcagtacacatccaattatgcaaaatctgccaacgttgatttcactgtggacaacaatggactttatactgagcctcgccccattggcacccgttaccttacccgtcccttg

SEQ ID NO: 687 - DNA, 2208 bp, Artificial Sequence; identical to SEQ ID NO: 678
  Description of Artificial Sequence: Synthetic polynucleotide

SEQ ID NO: 688 - DNA, 2205 bp, Artificial Sequence
  Description of Artificial Sequence: Synthetic polynucleotide
atggctgccgatggttatcttccagattggctcgaggacactctctctgaaggaataagacagtggtggaagctcaaacctggcccaccaccaccaaagcccgcagagcggcataaggacgacagcaggggtcttgtgcttcctgggtacaagtacctcggacccttcaacggactcgacaagggagagccggtcaacgaggcagacgccgcggccctcgagcacgacaaagcctacgaccggcagctcgacagcggagacaacccgtacctcaagtacaaccacgccgacgcggagtttcaggagcgccttaaagaagatacgtcttttgggggcaacctcggacgagcagtcttccaggcgaaaaagagggttcttgaacctctgggcctggttgaggaacctgttaagacggctccgggaaaaaagaggccggtagagcactctcctgtggagccagactcctcctcgggaaccggaaaggcgggccagcagcctgcaagaaaaagattgaattttggtcagactggagacgcagactcagtacctgacccccagcctctcggacagccaccagcagccccctctggtctgggaactaatacgatggctacaggcagtggcgcaccaatggcagacaataacgagggcgccgacggagtgggtaattcctcgggaaattggcattgcgattccacatggatgggcgacagagtcatcaccaccagcacccgaacctgggccctgcccacctacaacaaccacctctacaaacaaatttccagccaatcaggagcctcgaacgacaatcactactttggctacagcaccccttgggggtattttgacttcaacagattccactgccacttttcaccacgtgactggcaaagactcatcaacaacaactggggattccgacccaagagactcaacttcaagctctttaacattcaagtcaaagaggtcacgcagaatgacggtacgacgacgattgccaataaccttaccagcacggttcaggtgtttactgactcggagtaccagctcccgtacgtcctcggctcggcgcatcaaggatgcctcccgccgttcccagcagacgtcttcatggtgccacagtatggatacctcaccctgaacaacgggagtcaggcagtaggacgctcttcattttactgcctggagtactttccttctcagatgctgcgtaccggaaacaactttaccttcagctacacttttgaggacgttcctttccacagcagctacgctcacagccagagtctggaccgtctcatgaatcctctcatcgaccagtacctgtattacttgagcagaacaaacactccaagtggaaccaccacgcagtcaaggcttcagttttctcgggccggagcgagtgacattcgggaccagtctaggaactggcttcctggaccctgttaccgccagcagcgagtatcaaagacatctgcggataacaacaacagtgaatactcgtggactggagctaccaagtaccacctcaatggcagagactctctggtgaatccgggcccggccatggcaagccacaaggacgatgaagaaaagttttttcctcagagcggggttctcatctttgggaagcaaggctcagagaaaacaaatgtggacattgaaaaggtcatgattacagacgaagaggaaatcaggacaaccaatcccgtggctacggagcagtatggttctgtatctaccaacctccagagaggcaacagacaagcagctaccgcagatgtcaacacacaaggcgttcttccaggcatggtctggcaggacagagatgtgtaccttcaggggcccatctgggcaaagattccacacacggacggacattttcacccctctcccctcatgggtggattcggacttaaacaccctcctccacagattctcatcaagaacaccccggtacctgcgaatccttcgaccaccttcagtgcggcaaagtttgcttccttcatcacacagtactccacgggacaggtcagcgtggagatcgagtgggagctgcagaaggaaaacagcaaacgctggaatcccgaaattcagtacacttccaactacaacaagtctgttaatgtggactttactgtggacactaatggcgtgtattcagagcctcgccccattggcaccagatacctgactcgtaatctg

SEQ ID NO: 689 - protein, 736 aa, Artificial Sequence
  Description of Artificial Sequence: Synthetic polypeptide
MAADGYLPDWLEDNLSEGIREWWALKPGAPQPKANQQHQDNARGLVLPDYKYLGPGNGLDKGEPVNAADVAALEHDKAYDQQLKAGDNPYLKYNHADAEFQERLKEDTSFGGNLGRAVFQAKKRLLEPLGLVEEAAKTAPGKKRPVEQSPQEPDSSAGIGKSGAQPAKKRLNFGQTGDTESVPDPQPIGEPPAAPSGVGSLTMASGGGAPVADNNEGADGVGSSSGNWHCDSQWLGDGVITTSTRTWALPTYNNHLYKQISNSTSGGSSNDNAYFGYSTPWGYFDFNRFHCHFSPRDWQRLINNNWGFRPKRLNFKLFNIQVKEVTDNNGVKTIANNLTSTVQVFTDSDYQLPYVLGSAHEGCLPPFPADVFMIPQYGYLTLNDGSQAVGRSSFYCLEYFPSQMLRTGNNFQFSYEFENVPFHSSYAHSQSLDRLMNPLIDQYLHYLPKTINGSGQNQQTLKFSVAGPSNMAVQGRNYIPGPSYRQQRVSTTVTQNNNSEFAWPGASSWALNGRNSLMNPGPAMASYKEGEDSFFPLSGSLIFGKQGTGRDNVDADKVMITNEEEIKTTNPVATESYGQVATNHQSAQAQAQTGWVQNQGILPGMVWQDRDVYLQGPIWAKIPHTDGNFHPSPLMGGFGMKHPPPQTLIKNTPVPADPPTAFNKDKLNSFITQYSTGQVSVEIEWELQKENSKRWNPEIQYTSNYYKSNNVEFAVNTEGVYSEPRPIGTRYLTRNL

SEQ ID NO: 690 - protein, 736 aa, Artificial Sequence
  Description of Artificial Sequence: Synthetic polypeptide
MAADGYLPDWLEDNLSEGIREWWALKPGAPQPKANQQHQDNARGLVLPGYKYLGPGNGLDKGEPVNAADAAALEHDKAYDQQLKAGDNPYLKYNHADAEFQERLKEDTSFGGNLGRAVFQAKRRLLEPLGLVEEAAKTAPGKKRPVEQSPQEPDSSAGIGKSGAQPAKKRLNFGQTGDTESVPDPQPIGEPPAAPSGVGSLTMASGGGAPVADNNEGADGVGSSSGNWHCDSQWLGDRVITTSTRTWALPTYNNHLYKQISNSTSGGSSNDNAYFGYSTPWGYFDFNRFHCHFSPRDWQRLINNNWGFRPKRLNFKLFNIQIKEVTDNNGVKTIANNLTSTVQVFTDLDYQLPYVLGSAHEGCLPPFPADVFMIPQYGYLTLNDGSQAVGRSSFYCLEYFPSQMLRTGNNFQFSYEFENVPFHSSYAHSQSLDRLMNPLIDQYLHYLSKTINGSGQNQQTLKFSVAGPSNMAVQGRNYIPGPSYRQQRVSTTVTQNNNSEFAWPGASSWALNGRNSLMNPGPAMASYKEGEDSFFPLSGSLIFGKQGTGRDNVDADKVMITNEEEIKTTNPVATESYGQVATNHQSAQAQAQTGWVQNQGILPGMVWQDRDVYLQGPIWAKIPHTDGNFHPSPLMGGFGMKHPPPQTLIKNTPVPADPPTAFNKDKLNSFITQYSTGQVSVEIEWELQKENSKRWNPEIQYTSNYYKSNNVEFAVNTEGVYSEPRPIGTRYLTRNL

SEQ ID NO: 691 - protein, 736 aa, Artificial Sequence
  Description of Artificial Sequence: Synthetic polypeptide
MAADGYLPDWLEDNLSEGIREWWALKPGAPQPKANQQHQDNARGLVLPGYKYLGPGNGLDKGEPVSAADAAALEHDKAYDQQLKAGDNPYLKYNHADAEFQERLKEDTSFGGNLGRAVFQAKKRLLEPLGLVEEAAKTAPGKKRPVEQSPQEPDSSAGIGKSGAQPAKKRLNFGQTGDTESVSDPQPIGEPPAAPSGVGSLTMASGGGAPVADNNEGADGVGSSSGNWHCDSQWLGDRVITTSTRTWALPTYNNHLYKQISNSTSGGSSNDNAYFGYSTPWGYFDFNRFHCHFSPRDWQRLINNNWGFRPKRLNFKLFNIQVKEVTDNNGVKTIANNLTSTVQVFTDSDYQLPYVLGSAHEGCLPPSPADVFMIPQYGYLTLNDGSQAVGRSSFYCLEYFPSQMLRTGNNFQFSYEFENVPFHSSYAHSQSLDRLMNPLIDQYLHYLSKTINGSGQNQQTLKFSVAGPSNMAVQGRNYIPGPSYRQQRVSTTVTQNNNSEFAWPGASSWALNGRNSLMNPGPAMASYKEGEDSFFPLSGSLIFGKQGTGRDDVDADKVIITNEEEIKTTNPVATESYGQVATNHQSAQAQAQTGWVQNQGILPGMVWQDRDVYLQGPIWAKIPHTDGNFHPSPLMGGFGMKHPPPQTLIKNTPVPADPPTAFNKDKLNSFITQYSTGQVSVEIEWELQKENSKRWNPEIQYTSNYYKSNNVEFAVNTEGVYSEPRPIGTRYLTRNL

SEQ ID NO: 692 - protein, 736 aa, Artificial Sequence
  Description of Artificial Sequence: Synthetic polypeptide
MAADGYLPDWLEDNLSEGIREWWALKPGAPQPKANQQHQDNARGLVLPGYKYLGPGNGLDKGEPVNAADAAALEHDKAYDQQLKAGDNPYLKYNHAGAEFQERLKEDTSFGGNLGRAVFQAKKRLLEPLGLVEEAAKTAPGKKRPVEQSPQEPDSSAGIGKSGAQPAKKRLNFGQTGDTESVPDPQPIGEPPAAPSGVGSLTMASGGGAPVADNNEGAGGVGSSSGNWHCDSQWLGDRVVTTSTRTWALPTYNNHLYKQISNSTSGGSSNDNAYFGYSTPWGYFDFNRFHCHFSPRDWQRLINNNWGFRPKRLNFKLFNIQVKEVTDNNGVKTIANNLTSTVQVFTDSDYQLPYVLGSAHGGCLPPFPADVFMIPQYGYLTLNDGSQAVGRSSFYCLEYFPSQMLRTGNNFQFSYEFENVPFHSSYAHSQSLDRLMNPLIDQYLHYLSKTINGSGQNQQTLKFSVAGPSNMAVQGRSYIPGPSYRQQRVSTTVTQNNNSEFAWPGASSWALNGRNSLMNPGPAMASYKEGEDSFFPLSGSLIFGKQGTGRDNVDADKVMITNEEEIKTTNPVATESYGQVATNHQSAQAQAQTGWVQNQGILPGMVWQDRDVYLQGPIWAKIPHTDGNFHPSPLMGGFGMKHPPPQTLIKNTPVPADPPTAFNKDKLNSFITQYSTGQVSVEIEWELQKENSKRWNPEIQYTSNYYKSNNVEFAVNTEGVYSEPRPIGTRYLTRNL

SEQ ID NO: 693 - protein, 736 aa, Artificial Sequence
  Description of Artificial Sequence: Synthetic polypeptide
MAADGYLPDWLEDNLSEGIREWWALKPGAPQPKANQQHQDNARGLVLPGYKYLGPGNGLDKGEPVNAADAAALEHDKAYDQQLKAGDNPYLKYNHADAEFQERLKEDTSFGGNLGRAVFQAKKRLLEPLGLVEEAAKTAPGKKRPVEQSPQEPDSSAGIGKSGAQPAKKRLNFGQTGDTESVPDPQPIGEPPAAPSGVGSLTMASGGGAPVADNNEGADGVGSSSGNWHCDSQWLGDRVVTTSTRTWALPTYNNHLYKQISNSTSGGSSNDNAYFGYSTPWGYFDFNRFHCHFSPRDWQRLINNNWGFRPKRLNFKLFNIQVKEVTDNNGVKTIANNLTSTVQVFTDSDYQLPYVLGSAHEGCLPPFPADVFMIPQYGYLTLNDGSQAVGRSSFYCLEYFPSQMLRTGNNFQFSYEFENVPFHSSHAHSQSLDRLMNPLIDQYLHYLSKTINGSGQNQQTLKFSVAGHSNMAVQGRNYIPGPSYRQQRVSTTVTQNNNSEFAWPGASSWALNGRNSLMNPGPAMASYKEGEDSFFPLSGSLIFGKQGTGRDNVDADKVMITNEEEIKTTNPVATESYGQVATNHQSAQAQAQTGWVQNQGILPGMVWQDRDVYLQGPIWAKIPHTDGNFHPSPLMGGFGMKHPPPQTLIKNTPVPADPPTAFNKDKLNSFITQYSTGQVSVEIGWELQKENSKRWNPEIQYTSNYYKSNNVEFAVNTEGVYSEPRPIGTRYLTRNL

SEQ ID NO: 694 - protein, 736 aa, Artificial Sequence
  Description of Artificial Sequence: Synthetic polypeptide
MAADGYLPDWLEDNLSEGIREWWALKPGAPQPKANQQHQDNARGLVLPGYKYLGPGNGLDKGEPVNAADAAALEHDKAYDQQLKAGDNPYLKYNHADAEFQERLKEDTSFGGNLGRAVFQAKKRLLEPLGLVEEAAKTAPGKKRPVEQSPQEPDSSAGIGKSGAQPAKKRLNFGQTGDTESVPDPQPIGEPPAAPSGVGSLTMASGGGAPVADNNEGADGVGSSSGNWHCDSQWLGDRVITTSTRTWALPTYNNRLYKQISNSTSGGSSNDNAYFGYSTPWGYFDFNRFHCHFSPRDWQRLINNNWGFRPKRLNFKPFNIQVKEVTDNNGVKTIANNLTSTVQVFTDSDYQLPYVLGSAHEGCLPPFPADVFMIPQYGYLTLNDGSQAVGRSSFYCLEYFPSQMLRTGNNFQFSYEFENVPFHSSYAHSQSLDRLMNPLIDQYLHYLSKTINGSGQNQQTLKFSVAGPSNMAVQGRNYIPGPSYRQQRVSTTVTQNNNSEFAWPGASSWALNGRNSLMNPGPAMASYKEGEDSFFPLSGSLIFGKQGTGRDNVDADKVMITNEEEIKTTNPVATESYGQVATNHQSAQAQAQTGWVQNQGILPGMVWQDRDVYLQGPIWAKIPHTDGNFHPSPLMGGFGMKHPPPQTLIKNTPVPADPPTAFNKDKLNSFITQYSTGQVSVEIEWELQKENSKRWNPEIQYTSNYYKSNNVEFAVNTEGVYSEPRPIGTRYLTRNL

SEQ ID NO: 695 - protein, 736 aa, Artificial Sequence
  Description of Artificial Sequence: Synthetic polypeptide
MAADGYLPDWLEDNLSEGIREWWALKPGAPQPKANQQHQDNARGLVLPGYKYLGPGNGLDKGEPVNAADAAALEHDKAYDQQLKAGDNPYLKYNHADAEFQERLKEDTSFGGNLGRAVFQAKKRLLEPLGLVEEAAKTAPGKKRPVEQSPQEPDSSAGIGKSGAQPAKKRLNFGQTGDTESVPDPQPIGEPPAAPSGVGSLTMASGGGAPVADNNEGADGVGSSSGNWHCDSQWLGDRVITTSTRTWALPTYNNHLYKQISNSTSGGSSNDNAYFGYSTPWGYFDFNRFHCHFSPRDWQRLINNNWGFRPKRLNFKLFNIQVKEVTDNNGVKTIANNLTSTVQVFTDSDYQLPYVLGSAHEGCLPPFPADVFMIPQYGYLTLNDGSQAVGRSSFYCLEYFPSQMLRTGNNFQFSYEFENVPFHSSYAHSQSLDRLMNPLIDQYLHYLSKTINGSGQNQQTLKFSVAGPSNMAVQGRNYIPGPSYRQQRVSTTVTQNNNSEFAWPGASSWALNGRNSLMNPGPAMASYKEGEDSFFPLSGSLIFGKQGTGRDNVDADKVMITNEEEIKTTNPVATESYGQVATNHQSAQAQAQTGWVQNQGILPGMVWQDRDVYLQGPIWAKIPHTDGNFHPSPLMGGFGMKHPPPQTLIKNTPVPADPPTAFNKDKLNSFITQYSTGQVSVEIEWELQKENSKRWNPEIQYTSNYYKSNNVEFAVNTEGVYSEPRPIGTRYLTRNL

SEQ ID NO: 696 - protein, 736 aa, Artificial Sequence; identical to SEQ ID NO: 695
  Description of Artificial Sequence: Synthetic polypeptide

SEQ ID NO: 697 - protein, 736 aa, Artificial Sequence
  Description of Artificial Sequence: Synthetic polypeptide
MAADGYLPDWLEDNLSEGIREWWDLKPGAPKPKANQQKQDDGRGLVLPGYKYLGPFNGLDKGEPVNAADAAALEHDKAYDQQLKAGDNPYLRYNHADAEFQERLQEDTSFGGNLGRAVFQAKKRVLEPFGLVEEGAKTAPGKKRPVEQSPQEPDSSSGIGKSGQQPAKKRLNFGQTGDSESVPDPQPLGEPPATPAALGPTTMASGGGAPMADNNEGADGVGNASGNWHCDSTWLGDRVITTSTRTWALPTYNNHLYKQISSASTGASNDNHYFGYSTPWGYFDFNRFHCHFSPRDWQRLINNNWGFRPKRLNFKLFNIQVKEVTTNDGVTTIANNLTSTVQVFSDSEYQLPYVLGSAHQGCLPPFPADVFMIPQYGYLTLNNGSKAVGRSSFYCLEYFPSQMLRTGNNFTFSYTFEEVPFHSSYAHSQSLDRLMNPLIDQYLYYLNRTQNQSGSAQNKDLLFSRGSPAGMSVQPKNWLPGPCYRQQRVSKTKTDNNNSNFTWTGASKYNLNGRESIINPGTAMASHKDDEDKFFPMSGVMIFGKESAGASNTALDNVMITDEEEIKATNPVATERFGTVAVNFQSSSTDPATGDVHVMGALPGMVWQDRDVYLQGPIWAKIPHTDGHFHPSPLMGGFGLKHPPPQILIKNTPVPANPPAEFSATKFASFITQYSTGQVSVEIEWELQKENSKRWNPEVQYTSNYAKSANVDFTVDNNGLYTEPRPIGTRYLTRPL

SEQ ID NO: 698 - protein, 736 aa, Artificial Sequence
  Description of Artificial Sequence: Synthetic polypeptide
MAADGYLPDWLEDNLSEGIREWWDLKPGAPKPKANQQKQDDGRGLVLPGYKYLGPFNGLDKGEPVNAADAAALEHDKAYDQQLKAGDNPYLRYNHADAEFQERLQEDTSFGGNLGRAVFQAKKRVLEPLGLVEEGAKTAPGKKRPVEQSPQEPDSSSGIGKTGQQPAKKRLNFGQTGDSESVPDPQPLGEPPATPAAVGPTTMASGGGAPMADNNEGADGVGNASGNWHCDSTWLGDRVITTSTRTWALPTYNNHLYKQISSTSTGASNDNHYFGYSTPWGYFDFNRFHCHFSPRDWQRLINNNWGFRPKRLNFKLFNIQVKEVTTNDGVTTIANNLTSTVQVFSDSEYQLPYVLGSAHQGCLPPFPADVFMIPQYGYLTLNNGSQAVGRSSFYCLEYFPSQMLRTGNNFTFSYTFEEVPFHSSYAHSQSLDRLMNPLIDQYLYYLNRTQNQSGSAQNKDLLFSRGSPAGMSVQPKNWLPGPCYRQQRVSKTKTDNNNSNFTWTGASKYNLNGRESIINPGTAVASHKDDEDKFFPMSGVMIFGKESAGASNTALDNVMITDEEEIKATNPVATERFGTVAVNFQSSSTDPATGDVHAMGALPGMVWQDRDVYLQGPIWAKIPHTDGHFHPSPLMGGFGLKNPPPQILIKNTPVPANPPAEFSATKFASFITQYSTGQVSVEIEWELQKENSKRWNPEVQYTSNYAKSANVDFTVDNNGLYTEPRPIGTRYLTRPL

SEQ ID NO: 699 - protein, 736 aa, Artificial Sequence
  Description of Artificial Sequence: Synthetic polypeptide
MAADGYLPDWLEDNLSEGIREWWALKPGAPQPKANQQHQDNARGLVLPGYKYLGPGNGLDKGEPVNAADAAALEHDKAYDQQLKAGDNPYLKYNHADAEFQERLKEDTSFGGNLGRAVFQAKKRLLEPLGLVEEAAKTAPGKKRPVEQSPQEPDSSAGIGKSGAQPAKKRLNFGQTGDTESVPDPQPIGEPPAAPSGVGSLTMASGGGAPVADNNEGADGVGSSSGNWHCDSQWLGDRVITTSTRTWALPTYNNHLYKQISNSTSGGSSNDNAYFGYSTPWGYFDFNRFHCHFSPRDWQRLINNNWGFRPKRLNFKLFNIQVKEVTDNNGVKTIANNLTSTVQVFTDSDYQLPYVLGSAHEGCLPPFPADVFMIPQYGYLTLNDGSQAVGRSSFYCLEYFPSQMLRTGNNFQFGYEFENVPFHSSYAHSQSLDRLMNPLIDQYLYYLSKTINGSGQNQQTLKFSVAGPSNMAVQGRNYIPGPSYRQQRVSTTVTQNNNSEFAWPGASSWALNGRNSLMNPGPAMASHKEGEDRFFPLSGSLIFGKQGTGRDNVDADKVMITNEEEIKTTNPVATESYGQVATNHQSAQAQAQTGWVQNQGILPGMVWQDRDVYLQGPIWAKIPHTDGNFHPSPLMGGFGMKHPPPQILIKNTPVPADPPTAFNKDKLNSFITQYSTGQVSVEIEWELQKENSKRWDPEIQYTSNYYKSNNVEFAVNTEGVYSEPRPIGTRYLTRNL

SEQ ID NO: 700 - protein, 736 aa, Artificial Sequence
  Description of Artificial Sequence: Synthetic polypeptide
MAADGYLPDWLEDNLSEGIREWWALKPGAPQPKANQQHQDNARGLVLPGYKYLGPGNGLDKGEPVNAADAAALEHDKAYDQQLKAGDNPYLKYNHADAEFQERLKEDTSFGGNLGRAVFQAKKRLLEPLGLVEEAAKTAPGKKRPVEQSPQEPDSSAGIGKSGAQPAKKRLNFGQTGDTESVPDPQPIGEPPAAPSGVGSLTMASGGGAPVADNNEGADGVGSSSGNWHCDSQWLGDRVITTSTRTWALPTYNNHLYKQISNSTSGGSSNDNAYFGYSTPWGYFDFNRFHCRFSPRDWQRLINNNWGFRPKRLNFKLFNIQVKEVTDNNGVKTIANNLTSTVQVFTDSDYQLPYVLGSAHEGCLPPFPADVFMIPQYGYLTLNDGSQAVGRSSFYCLEYFPSQMLRTGNNFQFSYEFENVPFHSSYAHSQSLDRLMNPLIDQYLYYLSKTINGSGQNQQTLKFSVAGPSNMAVQGRNYIPGPSYRQQRVSTTVTQNNNSEFAWPGASSWALNGRNSLMNPGPAMASHKEGEDRFFPLSGSLIFGKQGTGRDNVDADKVMITNEEEIKTTNPVATESYGQVATNHQSAQAQAQTGWVQNQGILPGMVWQDRDVYLQGPIWAKIPHTDGNFHPSPLMGGFGMKHPPPQILIKNAPVPADPPTAFNKDKLNSFITQYSTGQVSVEIEWELQKENSKRWNPEIQYTSNYYKSNNVEFAVNTEGVYSEPRPIGTRYLTRNL

SEQ ID NO: 701 - protein, 736 aa, Artificial Sequence
  Description of Artificial Sequence: Synthetic polypeptide
MAADGYLPDWLEDNLSEGIREWWALKPGAPQPKANQQHQDNARGLVLPGYKYLGPGNGLDKGEPVSAADAAALEHDKAYDQQLKAGDNPYLKYNHADAEFQERLKEDTSFGGNLGRAVFQAKKRLLEPLGLVEEAAKTAPGKKRPVEQSPQEPDSSAGIGKSGAQPAKKRLNFGQTGDTESVPDPQPIGEPPAAPSGVGSLTMASGGGAPVADNNEGADGVGSSSGNWHCDSQWLGDRVITTSTRTWALPTYNNHLYKQISNSTSGGSSNDNAYFGYSTPWGYFDFNRFHCHFSPRDWQRLINNNWGFRPKRLNFKLFNIQVKEVTDNNGVKTIANNLTSTVQVFTDSDYQLPYVLGSAHEGCLPPFPADVFMIPQYGYLTLNDGSQAVGRSSFYCLEYFPSQMLRTGNNFQFSYEFENVPFHSSYAHSQSLDRLMNPLIDQYLYYLSKTINGSGQNQQTLKFSVAGPSNMAVQGRNYIPGPSYRQQRVSTTVTQNNNSEFAWPGASSWALNGRNSLMNPGPAMASHKEGEDRFFPLSGSLIFGKQGTGRDNVDADKVMITNEEEIKTTNPVATESYGQVATNHQSAQAQAQTGWVQNQGILPGMVWQDRDVYLQGPIWAKIPHTDGNFHPSPLMGGFGMKHPPPQILIKNTPVPADPPTAFNKDKLNSFITQYSTGQVSVEIEWELQKENSKRWNPEIQYTSNYYKSNNVEFAVNTEGVYSEPRPIGTRYLTRNL

SEQ ID NO: 702 - protein, 736 aa, Artificial Sequence
  Description of Artificial Sequence: Synthetic polypeptide
MAADGYLPDWLEDNLSEGIREWWALKPGAPQPKANQQHQDNARGLVLPGYKYLGPGNGLDKGEPVNAADAAALEHDKAYDQQLKAGDNPYLKYNHADAEFQERLKEDTSFGGNLGRAVFQAKKRLLEPLGLVEEAAKTAPGKKRPVEQSPQEPDSSAGIGKSGAQPAKKRLNFGQTGDTESVPDPQPIGEPPAAPSGVGSLTMASGGGAPVADNNEGADGVGSSSGNWHCDSQWLGDRVITTSTRTWALPTYNNHLYKQISNSTSGGSSNDNAYFGYSTPWGYFDFNRFHCHFSPRDWQRLINNNWGFRPKRLNFKLFNIQVKEVTDNNGVKTIANNLTSTVQVFTDSDYQLPYVLGSAHEGCLPPFPADVFMIPQYGYLTLNDGSQAVGRSSFYCLEYFPSQMLRTGNNFQFSYEFENVPFHSSYAHSQSLDRLMNPLIDQYLYYLSKTINGSGQNQQTLKFSVAGPSNTAVQGRNYIPGPSYRQQRVSTTVTQNNNSEFAWPGASSWALNGRNSLMNPGPAMASHKEGEDRFFPLSGSLIFGKQGTGRDNVDADKVMITNEEEIKTTNPVATESYGQVATNHQSAQAQAQTGWVQNQGILPGMVWQDRDVYLQGPIWAKIPHTDGNFHPSPLMGGFGMKHPPPQILIKNTPVPADPPTAFNKDKLNSFITQYSTGQVSVEIEWELQKENSKRWNPEIQYTSNYYKSNNVEFAVNTEGVYSEPRPIGTRYLTRNL

SEQ ID NO: 703 - protein, 736 aa, Artificial Sequence
  Description of Artificial Sequence: Synthetic polypeptide
MAADGYLPDWLEDNLSEGIREWWALKPGAPQPKANQQHQDNARGLVLPGYKYLGPGNGLDKGEPVNAADAAALEHDKAYDQQLKAGDNPYLKYNHADAEFQERLKEDTSFGGNLGRAVFQAKKRLLEPLGLVEEAAKTAPGKKRPVEQSPQEPDSSAGIGKSGAQPAKKRLNFGQTGDTESVPDPQPIGEPPAAPSGVGSLTMASGGGAPVADNNEGADGVGSSSGNWHCDSQWLGDRVITTSTRTWALPTYNNHLYKQISNSTSGGSSNDNAYFGYSTPWGYFDFNRFHCHFSPRDWQRLINNNWGFRPKRLNFKLFNIQVKEVTDNNGVKTIANNLTSTVQVFTDSDYQLPYVLGSAHEGCLPPFPADVFMIPQYGYLTLNDGSQAVGRSSFYCLEYFPSQMLRTGSNFQFSYEFENVPFHSSYAHSQSLDRLMNPLIDQYLYYLSKTINGSGQNQQTLKFSVAGPSNMAVQGRNYIPGPSYRQQRVSTTVTQNNNSEFAWPGASSWALNGRNSLMNPGPAMASHKEGEDRFFPLSGSLIFGKQGTGRDNVDADKVMITNEEEIKTTNPAATESYGQVATNHQSAQAQAQTGWVQNQGILPGMVWQDRDVYLQGPIWAKIPHTDGNFHPSPLMGGFGMKHPPPQILIKNTPVPADPPTAFNKDKLNSFITQYSTGQVSVEIEWELQKENSKRWNPEIQHTSNYYKSNNVEFAVNTEGVYSEPRPIGTRYLTRNL

SEQ ID NO: 704 - protein, 736 aa, Artificial Sequence
  Description of Artificial Sequence: Synthetic polypeptide
MAADGYLPDWLEDNLSEGIREWWALKPGAPQPKANQQHQDNARGLVLPGYKYLGPGNGLDKGEPVNAADAAALEHDKAYDQQLKAGDNPYLKYNHADAEFQERLKEDTSFGGNLGRAVFQAKKRLLEPLGLVEEAAKTAPGKKRPVEQSPQEPDSSAGIGKSGAQPAKKRLNFGQTGDTESVPDPQPIGEPPAAPSGVGSLTMASGGGAPVADNNEGADGVGSSSGNWHCDSQWLGDRVITTSTRTWALPTYNNHLYKQISNSTSGGSSNDNAYFGYSTPWGYFDFNRFHCHFSPRDWQRLINNNWGFRPKRLNFRLFNIQVKEVTDNNGVKTIANNLTSTVQVFTDSDYQLPYVLGSAHEGCLPPFPADVFMIPQYGYLTLNDGSQAVGRSSFYCLEYFPSQMLRTGNNFQFSYEFENVPFHSSYAHSQSLDRLMNPLIDQYLYYLSKTINGSGQNQQTLKFSVAGPSNMAVQGRNYIPGPSYRQQRVSTTVTQNNNSEFAWPGASSWALNGRNSLMNPGPAMASHKEGEDRFFPLSGSLIFGKQGTGRDNVDADKVMITNEEEIKTTNPVATESYGQVATNHQSAQAQAQTGWVQSQGILPGMVWQDRDVYLQGPIWAKIPHTDGNFHPSPLMGGFGMKHPPPQILIKNTPVPADPPTAFNKDKLNSFITQYSTGQVSVEIEWELQKENSKRWNPEIQYTSNYYKSNNVEFAVNTEGVYSEPRPIGTRYLTRNL

SEQ ID NO: 705 - protein, 735 aa, Artificial Sequence
  Description of Artificial Sequence: Synthetic polypeptide
MAADGYLPDWLEDNLSEGIREWWALKPGAPQPKANQQHQDNARGLVLPGYKYLGPGNGLDKGEPVNAADAAALEHDKAYDQQLKAGDNPYLKYNHADAEFQERLKEDTSFGGNLGRAVFQAKKRLLEPLGLVEEAAKTAPGKKRPVEQSPQEPDSSAGIGKSGAQPAKKRLNFGQTGDTESVPDPQPIGEPPAAPSGVGSLTMASGGGAPVADNNEGADGVGSSSGNWHCDSQWLGDRVITTSTRTWALPTYNNHLYKQISNSTSGGSSNDNAYFGYSTPWRYFDFNRFHCHFSPRDWQRLINNWGFRPKRLNFKLFNIQVKEVTDNNGVKTIANNLTSTVQAFTDSDYQLPYVLGSAHEGCLPPFPADVFMIPQYGYLTLNDGSQAVGRSSFYCLEYFPSQMLRTGNNFQFSYEFENVPFHSSYAHSQSLDRLMNPLIDQYLYYLSKTINGSGQNQQTLKFSVAGPSNMAVQGRNYIPGPSYRQQRVSTTVTQNNNSEFAWPGASSWALNGRNSLMNPGPAMASHKEGEDRFFPLSGSLIFGKQGTGRDNVDADKVMITNEEEIKTTNPVATESYGQVATNHQSAQAQAQTGWVQNQGILPGMVWQDRDVYLQGPIWAKIPHTDGNFHPSPLMGGFGMKHPPPQILIKNTPVPADPPTAFNKDELNSFITQYSTGQVSVEIEWELQKENSKRWNPEIQYTSNYYKSNNVEFAVNTEGVYSEPRPIGTRYLTRNL

SEQ ID NO: 706 - protein, 735 aa, Artificial Sequence
  Description of Artificial Sequence: Synthetic polypeptide
MAADGYLPDWLEDNLSEGIREWWALKPGAPQPKANQQHQDNARGLVLPGYKYLGPGNGLDKGEPVNAADAAALEHDKAYDQQLKAGDNPYLKYNHADAEFQERLKEDTSFGGNLGRAVFQDKKRLLEPLGLVEEAAKTAPGKKRPVEQSPQEPDSSAGIGKSGAQPAKKRLNFGQTGDTESVPDPQPIGEPPAAPSGVGSLTMASGGGAPVADNNEGADGVGSSSGNWHCDSQWLGDRVITTSTRTWALPTYNNHLYKQISNSTSGGSSNDNAYFGYSTPWGYFDFNRFHCHFSPRDWQRLINNWGFRPKRLNFKLFNIQVKEVTDNNGVKTIANNLTSTVQVFTDSDYQLPYVLGSAHEGCLPPFPADVFMIPQYGYLTLNDGSQAVGRSSFYCLEYFPSQMLRTGNNFQFSYEFENVPFHSSYAHSQSLDRLMNPLIDQYLYYLSKTINGSGQNQQTLKFSVAGPSNMAVQGRNYIPGPSYRQQRVSTTVTQNNNSEFAWPGASSWALNGRNSLMNPGPAMASHKEGEDRFFPLSGSLIFGKQGTGRDNVDADKVMITNEEEIKTTNPVATESYGQVATNHQSAQAQAQTGWVQNQGILPGMVWQDRDVYLQGPIWAKIPHTDGNFHPSPLMGGFGMKHPPPQILIKNTPVPADPPTAFNKDKLNSFITQYSTGQVSVEIEWELQKENSKRWNPEIQYTSNYYKSNNVEFAVNTEGVYSEPRPIGTRYLTRNL

SEQ ID NO: 707 - protein, 736 aa, Artificial Sequence
  Description of Artificial Sequence: Synthetic polypeptide
MAADGYLPDWLEDNLSEGIREWWALKPGAPQPKANQQHQDNARGLVLPGYKYLGPGNGLDKGEPVNAADAAALEHDKAYDQQLKAGDNPYLKYNHADAEFQERLKEDTSFGGNLGRAVFQAKKRLLEPLGLVEEAAKTAPGKKRPVEQSPQEPDSSAGIGKSGAQPAKKRLNFGQTGDTESVPDPQPIGEPPAAPSGVGSLTMASGGGAPVADNNEGADGVGSSSGNWHCDSQWLGDRAITTSTRTWALPTYNNHLYKQISNSTSGGSSNDNAYFGYSTPWGYFDFNRFHCHFSPRDWQRLINNNWGFRPKRLNFKLFNIQVKEVTDNNGVKTIANNLTSTVQVFTDSDYQLPYVLGSAHEGCLPPFPADVFMIPQYGYLTLNDGSQAVGRSSFYCLEYFPSQMLRTGNNFQFSYEFENVPFHSSYAHSQSLDRLMNPLIDQYLYYLSKTINGSGQNQQTLKFSVAGPSNMAVQGRNYIPGPSYRQQRVSTTVTQNNNSEFAWPGASSWALNGRNSLMNPGPAMASHKEGEDRFFPLSGSLIFGKQGTGRDNVDADKVMTTNEEEIKTTNPVATESYGQVATNHQSAQAQAQTGWVQNQGILPGMVWQDRDVYLQGPIWAKIPHTDGNFHPSPLMGGFGMKHPPPQILIKNTPVPADPPTAFNKDKLNSFITQYSTGQVSVEIEWELQKENSKRWNPEIQYTSNYYKSNNVEFAVNTEGVYSEPRPIGTRYLTRNL

SEQ ID NO: 708 - protein, 736 aa, Artificial Sequence
  Description of Artificial Sequence: Synthetic polypeptide
MAADGYLPDWLEDNLSEGIREWWALKPGAPQPKANQQHQDNARGLVLPGYKYLGPGNGLDKGEPVNAADAAALEHDKAYDQQLKAGDNPYLKYNHADAEFQERLKEDTSFGGNLGRAVFQTKKRLLEPLGLVEEAAKTAPGKKRPVEQSPQEPGSSAGIGKSGAQPAKKRLNFGQTGDTESVPDPQPIGEPPAAPSGVGSLTMASGGGAPVADNNEGADGVGSSSGNWHCDSQWLGDRVITTSTRTWALPTYNNHLYKQISNSTSGGSSNDNAYFGYSTPWGYFDFNRFHCHFSPRDWQRLINNNWGFRPKRLNFKLFNIQVKEVTDNNGVKTIANNLTSTVQVFTDSDYQLPYVLGSAHEGCLPPFPADVFMIPQYGYLTLNDGSQAVGRSSFYCLEYFPSQMLRTGNNFQFSYEFENVPFHSSYAHSQSLDRLMNPLIDQYLHYLSKTINGSGQNQQTLKFSVAGPSNMAVQGRNYIPGPSYRQQRVSTTVTQNNNSEFAWPGASSWALNGRNSLMNPGPAMASHKEGEDRFFPLSGSLIFGKQGTGRDNVDADKVMITNEEEIKTTNPVATESYGQVATNHQSAQAQAQTGWVQNQGILPGMVWQDRDVYLQGPIWAKIPHTDGNFHPSPLMGGFGMKHPPPQILIKNTPVPADPPTAFNKDKLNSFITQYSTGQVSVEIEWELQKENSKRWNPEIQYTSNYYKSNNVEFAVNTEGVYSEPRPIGTRYLTRNL

SEQ ID NO: 709 - protein, 736 aa, Artificial Sequence
  Description of Artificial Sequence: Synthetic polypeptide
MAADGYFPDWLEDNLSEGIREWWALKPGAPQPKANQQHQDNARGLVLPGYKYLGPGNGLDKGEPVNAADAAALEHDKAYDQQLKAGDNPYLKYNHADAEFQERLKEDTSFGGNLGRAVFQAKKRLLEPLGLVEEAAKTAPGKKRPVEQSPQEPDSSAGIGKSGAQPAKKRLNFGQTGDTESVPDPQPIGESPAAPSGVGSLTMASGGGAPVADNNEGADGVGSSSGNWHCDSQWLGDRVITTSTRTWALPTYNNHLYKQISNSTSGGSSNDNAYFGYSTPWGYFDFNRFHCHFSPRDWQRLINNNWGFRPKRLNFKLFNIQVKEVTDNNGVKTIANNLTSTVQVFTDSDYQLPYVLGSAHEGCLPPFPADVFMIPQYGYLTLNDGSQAVGRSSFYCLEYLPSQMLRTGNNFQFSYEFENVPFHSSYAHSQSLDRLMNPLIDQYLHYLSKTINGSGQNQQTLKFSVAGPSNMAVQGRNYIPGPSYRQQRVSTTVTQNNNSEFAWPGASSWALNGRNSLMNPGPAVASHKEGEDRFFPLSGSLIFGKQGTGRDNVDADKVMITNEEEIKTTNPVATESYGQVATNHQSAQAQAQTGWVQNQGILPGMVWQDRDVYLQGPIWAKIPHTDGNFHPSPLMGGFGMKHPPPQILIKNTPVPADPPTAFNKDKLNSFITQYSTGQVSVEIEWELQKENSKRWNPEIQYTSNYYKSNNVEFAVNTEGVYSEPRPIGTRYLTRNL

SEQ ID NO: 710 - protein, 736 aa, Artificial Sequence
  Description of Artificial Sequence: Synthetic polypeptide
MAADGYLPDWLEDNLSEGIREWWALKPGAPQPKANQQHQDNARGLVLPGYKYLGPGNGLDKGEPVNAADAAALEHDKAYDQQLKAGDNPYLKYNHADAEFQERLKEDTSFGGNLGRAVFQAKKRLLEPLGPVEEAAKTAPGKKRPVEQSPQEPDSSAGIGKSGAQPAKKRLNFGQTGDTESVPDPQPIGEPPAAPSGVGSLTMASGGGAPVADNNEGADGVGSSSGNWHCDSQWLGDRVITTSTRTWALPTYNNHLYKQISNSTSGGSSNDNAYFGYSTPWGYFDFNRFHCHFSPRDWQRLINNNWGFRPKRLNFKLFNIQVKEVTDNNGVKTIANNLTSTVQVFTDSDYQLPYVLGSAHEGCLPPFPADVFMIPQYGYLTLNDGSQAVGRSSFYCLEYFPSQMLRTGNNFQFSYEFENVPFHSSYAHSQSLDRLMNPLIDQYLYYLSKTINGSGQNQQTLKFSVAGPSNMAVQGRNYIPGPSYRQQRVSTTVTQNNNSEFAWPGASSWALNGRNSLMNPGPAMASHKEGEDRFFPLSGSLIFGKQGTGRDNVDADKVMITNEEEIKTTNPVATESYGQAATNHQSAQAQAQTGWVQNQGILPGMVWQDRDVYLQGPIWAKIPHTDGNFHPSPLMGGFGMKHPPPQILIKNTPVPADPPTAFNKDKLNSFITQYSTGQVSVEIEWELQKENSKRWNPEIQYTSNYYKSNNVEFAVNTEGVYSEPRPIGTRYLTRNL

SEQ ID NO: 711 - protein, 736 aa, Artificial Sequence
  Description of Artificial Sequence: Synthetic polypeptide
MAADGYLPDWLEDNLSEGIREWWALKPGAPQPKANQQHQDNARGLVLPGYKYLGPGNGLDKGEPVNAADAAALEHDKAYDQQLKAGDNPYLKYNHADAEFQERLKEDTSFGGNLGRAVFQAKKRLLEPLGPVEEAAKTAPGKKRPVEQSPQEPDSSAGIGKSGAQPAKKRLNFGQTGDTESVPDPQPIGEPPAAPSGVGSLTMASGGGAPVADNNEGADGVGSSSGNWHCDSQWLGDRVITTSTRTWALPTYNNHLYKQISNSTSGGSSNDNAYFGYSTPWGYFDFNRFHCHFSPRDWRRLINNNWGFRPKRLNFKLFNIQVKEVTDNNGVKTIANNLTSTVQVFTDSDYQLPYVLGSAHEGCLPPFPADVFMIPQYGYLTLNDGSQAVGRSSFYCLEYFPSQMLRTGNNFQFSYEFENVPFHSSYAHSQSLDRLMNPLIDQYLYYLSKTINGSGQNQQTLKFSVAGPSNMAVQGRNYIPGPSYRQQRVSTTVTQNNNSEFAWPGASSWALNGRNSLMNPGPAMASHKEGEDRFFPLSGSLIFGKQGTGRDNVDADKVMITNEEEIKTTNPVATESYGQVATNHQSAQAQAQTGWVQNQGILPGMVWQDRDVYLQGPIWAKIPHTDGNFHPSPLMGGFGMKHPPPQILIKNTPVPADPPTAFNKDKLNSFITQYSTGQVSVEIEWELQKENSKRWNPEIQYTSNYYKSNNVEFAVNTEGVYSEPRPIGTRYLTRNL

SEQ ID NO: 712 - protein, 736 aa, Artificial Sequence
  Description of Artificial Sequence: Synthetic polypeptide
MAADGYLPDWLEDNLSEGIREWWALKPGAPQPKANQQHQDNARGLVLPGYKYLGPGNGLDKGEPVNAADAAALEHDKAYDQQLKAGDNLYLKYNHADAEFQERLKEDTSFGGNLGRAVFQAKKRLLEPLGLVEEAAKTAPGKKRPVEQSPQEPDSSAGIGKSGAQPAKKRLNFGQTGDTESVPDPQPIGEPPAAPSGVGSLTMASGGGAPVADNNEGADGVGSSSGNWHCDSQWLGDRVITTSTRTWALPTYNNHLYKQISNSTSGGSSNDNAYFGYSTPWGYFDFNRFHCHFSPRDWQRLINNNWGFRPKRLNFKLFNIQVKEVTDNNGVKTIANNLTSTVQVFTDSDYQLPYVLGSAHEGCLPPFPADVFMIPQYGYLTLNDGSQAVGRSSFYCLEYFPSQMLRTGNNFQFSYEFENVPFHSSYAHSQSLDRLMNPLIDQYLHYLSKTINGSGQNQQTLKFSVAGPSNMAVQGRNYIPGPSYRQQRVSTTVTQNNNSEFAWPGASSWALNGRNSLMNPGPAMASHKEGEDRFFPLSGSLIFGKQGTGRDNVDADKVMITNEEEIKTTNPVATESYGQVATNHQSAQAQAQTGWVQNQGILPGMVWQDRDVYLQGPIWAKIPHTDGNFHPSPLMGGFGMKHPPPQILIKNTPVPADPPTAFNKDKLNSFITQYSTGQVSVEIEWELQKENSKRWNPEIQYTSNYYKSNNVEFAVNTEGVYSEPRPIGTRYLTRNL

SEQ ID NO: 713 - protein, 736 aa, Artificial Sequence
  Description of Artificial Sequence: Synthetic polypeptide
MAADGYLPDWLEDNLSEGIREWWALKPGAPQPKANQQHQDNARGLVLPGYKYLGPGNGLDKGEPVNAADAAALEHDKAYDQQLKAGDNPYLKYNHADAEFQERLKEDTSFGGNLGRAVFQAKKRLLEPLGLVEEAAKTAPGKKRPVEQSPQEPDSSAGIGKSGAQPAKKRLNFGQTGDTESVPDPQPIGEPPAAPSGVGSLTMASGGGAPVADNNEGADGVGSSSGNWHCDSQWLGDRVITTSTRTWALPTYNNHLYKQISNSTSGGSSNDNAYFGYSTPWGYFDFNRFHCHFSPRDWQRLINNNWGFRPKRLNFKLFNIQVKEVTDNNGVKTIANNLTSTVQVFTDSDYQLPYVLGSAHEGCLPPFPADVFMIPQYGYLTLNDGSQAVGRSSFYCLEYFPSQMLRTGNNFQFSYEFENVPFHSSYAHSQSLDRLMNPLIDQYLHYLSKTINGSGQNQQTLKFSVAGPSNMAVQGRNYIPGPSYRQQRVSTTVTQNNNSEFAWPGASSWALNGRNSLMNPGPAMASHKEGEDRFFPLSGSLIFGKQGTGRDNVDADKVMITNEEEIKTTNPVATESYGQVATNHQSAQAQAQTGWVQNQGILPGMVWQDRDVYLQGPIWAKIPHTDGNFHPSPLMGGFGMKHPPPQILIKNTPVPADPPTAFNKDKLNSFITQYSTGQVSVEIEWELQKENSKRWNPEIQYTSNYYKSNNVEFAVNTEGVYSEPRPIGTRYLTRNL

SEQ ID NO: 714 - protein, 736 aa, Artificial Sequence
  Description of Artificial Sequence: Synthetic polypeptide
  MOD_RES (442)..(442): Any naturally occurring amino acid
MAADGYLPDWLEDNLSEGIREWWALKPGAPQPKANQQHQDNARGLVLPGYKYLGPGNGLDKGEPVNAADAAALEHDKAYDQQLKAGDNPYLKYNHADAEFQERLKEDTSFGGNLGRAVFQAKKRLLEPLGLVEEAAKTAPGKKRPVEQSPQEPDSSAGIGKSGAQPAKKRLNFGQTGDTESVPDPQPIGEPPAAPSGVGSLTMASGGGAPVADNNEGADGVGSSSGNWHCDSQWLGDRVITTSTRTWALPTYNNHLYKQISTSTSGGSSNDNAYFGYSTPWGYFDFNRFHCHFSPRDWQRLINNNWGFRPKRLNFKLFNIQVKEVTDNNGVKTIANNLTSTVQVFTDSDYQLPYVLGSAHEGCLPPFPADVFMIPQYGYLTLNDGSQAVGRSSFYCLEYFPSQMLRTGNNFQFSYEFENVPFHSSYAHSQSLDRLMNPLIDXYLHYLSKTINGSGQNQQTLKFSVAGPSNMAVQGRNYIPGPSYRQQRVSTTVTQNNNSEFAWPGASSWALNGRNSLMNPGPAMASHKEGEDRFFPLSGSLIFGKQGTGRDNVDADKVMITNEEEIKTTNPVATESYGQVATNHQSAQAQAQTGWVQNQGILPDMVWQDRDVYLQGPIWAKIPHTDGNFHPSPLMGGFGMKHPPPQILIKNTPVPADPPTAFNKDKLNSFITQYSTGQVSVEIEWELQKENSKRWNPEIQYTSNYYKSNNVEFAVNTEGVYSEPRPIGTRYLTRNL

SEQ ID NO: 715 - protein, 736 aa, Artificial Sequence; identical to SEQ ID NO: 695
  Description of Artificial Sequence: Synthetic polypeptide

SEQ ID NO: 716 - protein, 736 aa, Artificial Sequence; identical to SEQ ID NO: 699
  Description of Artificial Sequence: Synthetic polypeptide

SEQ ID NO: 717 - protein, 736 aa, Artificial Sequence
  Description of Artificial Sequence: Synthetic polypeptide
MAADGYLPDWLEDNLSEGIREWWALKPGAPQPRANQQHQDNARGLVLPGYKYLGPGNGLDKGEPVNAADAAALEHDKAYDQQLKAGDNPYLKYNHADAEFQERLKEDTSFGGNLGRAVFQAKKRLLEPLGLVEEAAKTAPGKKRPVEQSPQEPDSSAGIGKSGAQPAKKRLNFGQTGDTESVPDPQPIGEPPAAPSGVGSLTMASGGGAPVADNNEGADGVGSSSGNWHCDSQWLGDRVITTSTRTWALPTYNNHLYKQISNSTSGGSSNDNAYFGYSTPWGYFDFNRFHCHFSPRDWQRLINNNWGFRPKRLNFKLFNIQVKEVTDNNGVKTIANNLTSTVQVFTDSDCQLPYVLGSAHEGCLPPFPADVFMIPQYGYLTLNDGSQAVGRSSFYCLEYFPSQMLRTGNNFQFSYEFENVPFHSSYAHSQSLDRLTNPLIDQYLYYLSKTINGSGQNQQTLKFSVAGPSNMAVQGRNYIPGPSYRQQRVSTTVTQNNNSEFAWPGASSWALNGRNSLMNPGPAMASHKEGEDRFFPLSGSLIFGKQGTGRDNVDADKVMITNEEEIKTTNPVATESHGQVATNHQSAQAQAQTGWVQNQGILPGMVWQDRDVYLQGPIWAKIPHTDGNFHPSPLMGGFGMKHPPPQILIKNTPVPADPPTAFNKDKLNSFITQYSTGQVSVEIEWELQKENSKRWNPEIQYTSNYYKSNNVEFAVNTEGVYSEPRPIGTRYLTRNL

SEQ ID NO: 718 - protein, 736 aa, Artificial Sequence
  Description of Artificial Sequence: Synthetic polypeptide
MAADGYLPDWLEDNLSEGIREWWALKPGAPQPKANQQHQDNARGLVLPGYKYLGPGNGLDKGEPVNAADAAALEHDKAYDQQLKAGDNPYLKYNHADAEFQERLKEDTSFGGNLGRAVFQAKKRLLEPLGLVEEAAKTAPGKKRPVEQSPQEPDSSAGIGKSGAQPAKKRLNFGQTGDTESVPDPQPIGEPPAAPSGVGSLTMASGGGAPVADNNEGADGVGSSSGNWHCDSQWLGDRVITTSTRTWALPTYNNHLYKQISNSTSGGSSNDNAYFGYSTPWGYFDFNRFHCHFSPRDWQRLINNNWGFRPKRLNFKLFNIQVKEVTDNNGVKTIANNLTSTVQVFTDSDYQLPYVLGSAHEGCLPPFPADVFMIPQYGYLTLNDGSQAVGRSSFYCLEYFPSQMLRTGNNFQFSYEFENVPFHSSYAHSQSLDRLMNPPIDQYLYYLSKTINGSGQNQQTLKFSVAGPSNMAVQGRNYIPGPSYRQQRVSTTVTQNNNSEFAWPGASSWALNGRNSLMNPGPAMASHKEGEDRFFPLSGSLIFGKQGTGRDNVDADKVMITNEEEIKTTNPVATESYGQVATNHQSAQAQAQTGWVQNQGILPGMVWQDRDVYLQGPIWAKIPHTDGNFHPSPLMGGFGMKHPPPQILIKNTPVPADPPTAFNKDKLNSFITQYSTGQVSVEIEWELQKENSKRWNPEIQYTSNYYKSNNVEFAVNTEGVYGEPRPIGTRYLTRNL

SEQ ID NO: 719 - protein, 736 aa, Artificial Sequence
  Description of Artificial Sequence: Synthetic polypeptide
MAADGYLPDWLEDNLSEGIREWWALKPGAPQPKANQQHQDNARGLVLPGYKYLGPGNGLDKGEPVNAADAAALEHDKAYDQQLKAGDNPYLKYNHADAEFQERLKEDTSFGGNLGRAVFQAKKRLLEPLGLVEEAAKTAPGKKRPVEQSPQEPDSSAGIGKSGAQPAKKRLNFGQTGDTESVPDPQPIGEPPAAPSGVGSLTMASGGGAPVADNNEGADGVGSSSGNWHCDSQWLGDRVITTSTRTWALPTYNNHLYKQISNSTSGGSSNDNAYFGYSTPWGYFDFNRFHCHFSPRDRQRLINNNWGFRPKRLNFKLFNIQVKEVTDNNGVKTIANNLTSTVQVFTDSDYQLPYVLGSAHEGCLPPFPADVFMIPQYGYLTLNDGSQAVGRSSFYCLEYFPSQMLRTGNNFQFSYEFENVPFHSSYAHSQSLDRLMNPLIDQYLYYLSKTINGSGQNQQTLKFSVAGPSNMAVQGRNYIPGPSYRQQRVSTTVTQNNNSEFAWPGASSWALNGRNSLMNPGPAMASHKEGEDRFFPLSGSLIFGKQGTGRDNVDADKVMITNEEEIKTTNPVATESYGQVATNHQSAQAQAQTGWVQNQGILPGMVWQDRDVYLQGPIWAKIPHTDGNFHPSPLMGGFGMKHPPPQILIKNTPVPADPPTAFNKDKLNSFITQYSTGQVSVEIEWELQKENSKRWNPEIQYTSNYYKSNNVEFAVNTEGVYSEPRPIGTRYLTRNL

SEQ ID NO: 720 - protein, 736 aa, Artificial Sequence
  Description of Artificial Sequence: Synthetic polypeptide
MAADGYLPDWLEDNLSEGIREWWALKPGAPQPKANQQHQDNARGLVLPGYKYLGPGNGLDKGEPVNAADAAALEHDKAYDQQLKAGDNPYLKYNHADAEFQERLKEDTSFGGNLGRAVFQAKKRLLEPLGLVEEAAKTAPGKKRPVEQSPQEPDSSAGIGKSGAQPAKKRLNFGQTGDTESVPDPQPIGEPPAAPSGVGSLTMASGGGAPVADNNEGADGVGSSSGNWHCNSQWLGDRVITTSTRTWALPTYNNHLYKQISNSTSGGSSNDNAYFGYSTPWGYFDFNRFHCHFSPRDWQRLINNNWGFRPKRLNFKLFNIQVKEVTDNNGVKTIANNLTSTVQVFTDSDYQLPYVLGSAHEGCLPPFPADVFMIPQYGYLTLNDGSQAVGRSSFYCLEYFPSQMLRTGNNFQFSYEFENVPFHSSYAHSQSLDRLMNPLIDQYLYYLSKTINGSGQNQQTLKFSVAGPGNMAVQGRNYIPGPSYRQQRVSTTVTQNNNSEFAWPGASSWALNGRNSLMNPGPAMASHKEGEDRFFPLSGSLIFGKQGTGRDNVDADKVMITNEEEIKTTNPVATESYGQVATNHQSAQAQAQTGWVQNQGILPGMVWQDRDVYLQGPIWAKIPHTDGNFHPSPLMGGFGMKHPPPQILIKNTPVPADPPTAFNKDKLNSFITQYSTGQVSVEIEWELQKENSKRWNPEIQYTSNYYKSNNVEFAVNTEGVYSEPRPIGTRYLTRNL

SEQ ID NO: 721 - protein, 736 aa, Artificial Sequence
  Description of Artificial Sequence: Synthetic polypeptide
MAADGYLPDWLEDNLSEGIREWWALKPGAPQPKANQQHQDNARGLVLPGYRYLGPGNGLDKGEPVNAADAAALEHDKAYDQQLKAGDNPYLKYNHADAEFQERLKEDTSFGGNLGRAVFQAKKRLLEPLGLVEEAAKTAPGKKRPVEQSPQEPDSSAGIGKSGAQPAKKRLNFGQTGDTESVPDPQPIGEPPAAPSGVGSLTMASGGGAPVADNNEGADGVGSSSGNWHCDSQWLGDRVITTSTRTWALPTYNNHLYKQISNSTSGGSSNDNAYFGYSTPWGYFDFNRFHCHFSPRDWQRLINNNWGFRPKRLNFKLFNIQVKEVTDNNGVKTVANNLTSTVQVFTDSDYQLPYVLGSAHEGCLPPFPADVFMIPQYGYLTLNDGSQAVGRSSFYCLEYFPSQMLRTGNNFQFSYEFENVPFHSSYAHSQSLDRLMNPLIDQYLYYLSKTINGSGQNQQTLKFSVAGPSNMAVQGRNYIPGPSYRQQRVSTTVTQNNNSEFAWPGASSWALNGRNSLMNPGPAMASHKEGEDRFFPLSGSLIFGKQGTGRDNVDADKVMITNEEEIKTTNPVATESYGQVATNHQSAQAQAQTGWVQNQGILPGMVWQDRDVYLQGPIWAKIPHTDGNFHPSPLMGGFGMKHPPPQILIKNTPVPADPPTAFNKDKLNSFITQYSTGQVSVEIEWELQKENSKRWNPEIQYTSNYYKSNNVEFAVNTEGVYSGPRPIGTRYLTRNL

SEQ ID NO: 722 - protein, 736 aa, Artificial Sequence; identical to SEQ ID NO: 132
  Description of Artificial Sequence: Synthetic polypeptide

SEQ ID NO: 723 - protein, 736 aa, Artificial Sequence
  Description of Artificial Sequence: Synthetic polypeptide
MAADGYLPDWLEDNLSEGIREWWALKPGAPQPKANQQRQDNARGLVLPGYKYLGPGNGLDKGEPVNAADAAALEHDKAYDQQLKAGGNPCLKYNHADAEFQERLKEDTSFGGNLGRAVFQAKKRLLEPLGLVEEAAKTAPGKKRPVEQSPQEPDSSAGIGRSGAQPAKKRLNFGQTGDTESVPDPQPIGEPPAAPSGVGSLTMASGGGAPVADNNEGADGVGSSSGNWHCDSQWLGDRVITTSTRTWALPTYNNHLYKQISNSTSGGSSNDNAYFGYSTPWGYFDFNRFHCHFSPRDWQRLINNNWGFRPKRLNFKLFNIQVKEVTDNNGVKAIANNLTSTVQVFTDSDYQLPYVLGSAHEGCLPPFPADVFMIPQYGYLTLNDGSQAVGRSSFYCLEYFPSQMLRTGNNFQFSYEFENVPFHSSYAHSQSLDRLMNPLIDQYLYYLSKTIDGSGQNQQTLKFSVAGPSNMAVQGRNYIPGPSYRQQRVSTTVTQNNNSEFAWPGASSWALNGRNSLMDPGPAMASHKEGEDRFFPLSGSLIFGKQGTGRDNVDADKVMITNEEEIKTTNPVATESYGQVATNHQSAQAQAQTGWVQNQGILPGMVWQDRDVYLQGPIWAKIPHTGGNFHPSPLMGGFGMKHPPPQILIKNTPVPADPPTAFNKDKLNSFITQYSTGQVSVEIEWELQKENSKRWNPEIQYTSNYYKSNNVEFAVNTEGVYSEPRPIGTRYLTRNL

SEQ ID NO: 724 - protein, 736 aa, Artificial Sequence
  Description of Artificial Sequence: Synthetic polypeptide
MAADGYLPDWLEDNLSEGIREWWALKPGAPQPKANQQHQDNARGLVLPGYKYLGPGNGLDKGEPVNAADAAALEHDKAYDQQLKAGDNPYLKYNHADAEFQERLKEDTSFGGNLGRAVFQAKKRLLEPLGLVEEAAKTAPGKKRPVEQSPQEPDSSAGIGKSGAQPAKKRLNFGQTGDTESVPDPQPIGEPPAAPSGVGSLTMASGGGAPVADNNEGADGVGSSSGNWHCDSQWLGDRVITTSTRTWALPTYNNHLYKQISNSTSGGSSNDNAYFGYSTPWGYFDFNRFHCHFSPRDWQRLINNNWGFRPKRLNFKLFNIQVKEVTDNNGVKTIANNLTSTVQVFTDSDYQLPYVLGSAHEGCLPPFPADVFMIPQYGYLTLNDGSQAVGRSSFYCLEYFPSQMLRTGNNFQFSYEFENVPFHSSYAHSQSLDRLMNPLIDQYLYYLSKTINGSGQNQQTLKFSVAGPSNMAVQGRNYIPGPSYRQQRVSTTVTQNNNSEFAWPGASSWALNGRNSLMNPGPAMASHKEGEDRFFPLSGSLIFGKQGTGRDNVDADKVMITNEEEIKTTNPVATESYGQVATNHQSAQAQAQTGWVQNQGILPGMVWQDRDVYLQGPIWAKIPHTDGNFHPSPLMGGFGMKHPPPQILIKNTPVPADPPTAFNKDKLNSFITQYSTGQVSVEIEWELQKENSKRWNPEIQYTSNYYKPNNVEFAVNTEGVYSEPRPIGTRYLTRNL

SEQ ID NO: 725 - protein, 736 aa, Artificial Sequence
  Description of Artificial Sequence: Synthetic polypeptide
MAADGYLPDWLEDNLSEGIREWWALKPGAPQPKANQQHQDNARGLVLPGYKYLGPGNGLDKGEPVNAADAAALEHNKAYDQQLKAGDNPYLKCNHADAEFQERLKEDTSFGGNLGRAVFQAKKRPLEPLGLVEEAAKTAPGKKRPVEQSPQEPDSSAGIGKSGAQPAKKRLNFGQTGDTESVPDPQPIGEPPAAPSGVRSLTMASGGGAPVADNNEGADGVGSSSGNWHCDSQWLGDRVITTSTRTWALPTYNNHLYKQISNSTSGGSSNDNAYLGYSTPWGYFDFNRFHCHFSPRDWQRLINNNWGFRPKRLNFKLFNIQVKEVTDNNGVKTIANNLTSTVQVFTDSDYQLPYVLGSAHEGCLPPFPADVFMIPQYGYLTLNDGSQAVGRSSFYCLEYFPSQMLRTGNNFQFSYEFENVPFHSSYAHSQSLDRLMNPLIDQYLYYLSKTINGSGQNQQTLKFSVAGPSNMAVQGRNYIPGPSYRQQRVSTTVTQNNNSEFAWPGASSWALNGRNSLMNPGPTMASHKEGEDRFFPLSGSLIFGKQGTGRDNVDADKVMITNEEEIKTTNPVATESYGQVATNHQSAQAQAQTGWVQNQGILPGMVWQDRDVYLQGPIWAKIPHTDGNFHPSPLMGGFGMKHPPPQILIKNTPVPADPPTAFNKDKLNSFITQYSTGQVSVEIEWELQKENSKRWNPEIQYTSNYYKSNNVEFAVNTEGVYSEPRPIGTRYLTRNL

SEQ ID NO: 726 - protein, 736 aa, Artificial Sequence
  Description of Artificial Sequence: Synthetic polypeptide
MAADGYLPDWLEDNLSEGIREWWALKPGAPQPKANQQHQDNARGLVLPGYKYLGPGNGLDKGEPVNAADAAALVHDKAYDQQLKAGDNPYLKCNHADAEFQERLKEDTSFGGNLGRAVFQAKKRLLEPLGLVEEAAKTAPGKKRPVEQSPQEPDSSAGIGKSGAQPAKKRLNFGQTGDTESVPDPQPIGEPPAAPSGVGSLTMASGGGAPVADNNEGADGVGSSSGNWHCDSQWLGDRVITTSTRTWALPTYNNHLYKQISNSTSGGSSNDNAYLGYSTPWGYFDFNRFHCHFSPRDWQRLINNNWGFRPKRLNFKLFNIQVKEVTDNNGVKTIANNLTSTVQVFTDSDYQLPYVLGSAHEGCLPPFPADVFTIPQYGYLTLNDGSQAVGRSSFYCLEYFPSQMLRTGNNFQFSYEFENVPFHSSYAHSQSLDRLMNPLIDQYLYYLSKTINGSGQNQQTLKFSVAGPSNMAVQGRNYIPGPSYRQQRVSTTVTQNNNSEFAWPGASSWALNGRNSLMNPGPAMASHKEGEDRFFPLSGSLIFGKQGTGRDNVDADKVMITNEEEIKTTNPVATESYGQVATNHQSAQAQAQTGWVQNQGILPGMVWQDRDVYLQGPIWAKIPHTDGNFHPSPLMGGFGMKHPPPQILIKNTPVPADPPTAFNKDKLNSFITQYSTGQVSVEIEWELQKENSKRWNPEIQYTSNYYKSNNVEFAVNTEGVYSEPRPIGPRYLTRNF

SEQ ID NO: 727 - protein, 736 aa, Artificial Sequence
  Description of Artificial Sequence: Synthetic polypeptide
MAADGYLPDWLEDNLSEGIREWWALKPGAPQPKANQQHQDNARGLVLPGYKYLGPGNGLDKGEPVNAADAAALEHNKAYDQQLKAGDNPYLKCNHADAEFQERLKEDTSFGGNLGRAVFQAKKRLLEPLGLVEEAAKTAPGKKRPVEQSPQEPDSSAGIGKSGAQPAKKRLNFGQTGDTESVPDPQPIGEPPAAPSGVRSLTMASGGGAPVADNNEGADGVGSSSGNWHCDSQWLGDRVITTSTRTWALPTYNNHLYKQISNSTSGGSSNDNAYLGYSTPWGYFDFNRFHCHFSPRDWQRLINNNWGFRPKRLNFKLFNIQVKEVTDNNGVKTIANNLTSTVQVFTDSDYQLPYVLGSAHEGCLPPFPADVFMIPQYGYLTLNDGSQAVGRSSFYCLEYFPSQMLRTGNNFQFSYEFENVPFHSSYAHSQSLDRLMNPLIDQYLYYLSKTINGSGQNQQTLKFSVAGPSNMAVQGRNYIPGPSYRQQRVSTTVTQNNNSEFAWPGASSWALNGRNSLMNPGPAMASHKEGEDRFFPLSGSLIFGKQGTGRDNVDADKVMITNEEEIKTTNPVATESYGQVATNHQSAQAQAQTGWVQNQGILPGMVWQDRDVYLQGPIWAKIPHTDGNFHPSPLMGGFGMKHPPPQILIKNTPVPADPPTAFNKDKLNSFITQYSTGQVSVEIEWELQKENSKRWNPEIQYTSNYYKSNNVEFAVNTEGVYSEPRPIGTRYLTRNL

SEQ ID NO: 728 - protein, 736 aa, Artificial Sequence
  Description of Artificial Sequence: Synthetic polypeptide
MAADGYLPDWLEDNLSEGIREWWALKPGAPQPKANQQHQDNARGLVLPGYKYLGPGNGLDKGEPVNAADAAALEHDKAYDQQLKAGDNPYLKCNHADAEFQERLKEDTSFGGNLGRAVFQAKKRLLEPLGLVEEAAKTAPGKKRPVEQSPQEPDSSAGIGKSGAQPAKKRLNFGQTGDTESVPDPQPIGEPPAAPSGVGSLTMASGGGAPVADNNEGADGVGSSSGNWHCDSQWLGDRVITTSTRTWALPTYNNHLYKQISNSTSGGSSNDNAYLGYSTPWGYFDFNRFHCHFSPRDWQRLINNNWGFRPKRLNFELFNIQVKEVTDNNGVKTIANNLTSTVQVFTDSDYQLPYVLGSAHEGCLPPFPADVFMIPQYGYLTLNDGSQAVGRSSFYCLEYFPSQMLRTGNNFQSSYEFENVPFHSSYAHSQSLDRLMNPLIDQYLYYLSKTINGSGQNQQTLKFSVAGPSNMAVQGRNYIPGPSYRQQRASTTVTQNNNSEFAWPGASSWALNGRNSLMNPGPAMASHKEGEDRFFPLSGSLIFGKQGTGRDNVDADKVMITNEEEIKTTNPVATESYGQVATNHQSAQAQAQTGWVQNQGILPGMVWQDRDVYLQGPIWAKIPHTDGNFHPSPLMGGFGMKHPPPQILIKNTPVPADPPTAFNKDKLNSFITQYSTGQVSVEIEWELQKENSKRWNPEIQYTSNYYKSNNVEFAVNTEGVYSEPRPIGTRYLTRNL

SEQ ID NO: 729 - protein, 736 aa, Artificial Sequence
  Description of Artificial Sequence: Synthetic polypeptide
MAADGYLPDWLEDNLSEGIREWWALKPGAPQPKANQQHQDNARGLVLPGYKYLGPGNGLDKGEPVNAADAAALEHDKAYDQQLKAGDNPYLKCNHADAEFQERLKEDTSFGGNLGRAVFQAKKRLLEPLGLVEEAAKTAPGKKRPVEQSPQEPDSSAGIGKSGAQPAKKRLNFGQTGDTESVPDPQPIGEPPAAPPGVGSLTMASGGGAPVADNNEGADGVGSSSGNWHCDSQWLGDRVITTSTRTWALPTYNNHLYKQISNSTSGGSSNDNAYLGYSTPWGYFDFNRFHCHFSPRDWQRLINNNWGFRPKRLNFKLFNIQVKEVTDNNGVKTIANNLTSTVQVFTDSDYQLPYVLGSAHEGCLPPFPADVFMIPQYGYLTLNDGSQAVGRSSFYCLEYFPSQMLRTGNNFQFSYEFENVPFHSSYAHSQSLDRLMNPLIDQYLYYLSKTISGSGQNQQTLKFSVAGPSNMAVQGRNYIPGPSYRQQRVSTTVTQNNSSEFAWPGASSWALNGRNSLMNPGPAMASHKEGEDRFFPLSGSLIFGKQGTGRDNVDADKVMITNEEEIKTTNPVATESYGQVATNHQSAQAQAQTGWVQNQGILSGMVWQDRDVYLQGPIWAKIPHTDGNFHPSPLMGGFGMKHPPPQILIKNTPVPADPPTAFNKDKLNSFITQYSTGQVSVEIEWELQKENSKRWNPEIQYTSNYYKSNNVEFAVNTEGVYSEPRPIGTRYLTRNL

SEQ ID NO: 730 - protein, 736 aa, Artificial Sequence
  Description of Artificial Sequence: Synthetic polypeptide
MAADGYLPDWLEDNLSEGIREWWALKPGAPQPKANQQHQDNARGLVLPGYKYLGPGNGLDKGEPVNAADAAALEHDKAYDQQLKAGDNPYLKCNHADAEFQERLKEDTSFGGNLGRAVFQAKKRLLEPLGLVEEAAKTAPGKKRPVEQSPQEPDSSAGIGKSGAQPAKKRLNFGQTGDTESVPDPQPIGEPPAAPSGVGSLTMASGGGAPVADNNEGADGVGSSSGNWHCDSQWLGDRVITTSTRTWALPTYNNHLYKQISNSTSGGSSNDNAYLGYSTPWGYFDFNRFHCHFSPRDWQRLINNNWGFRPKRLNFKLFNIQVKEVTDNNGVKTIANNLTSTVQVFTDSDYQLPYVLGSAHEGCLPPFPADVFMIPQYGYLTLNDGSQAVGRSSFYCLEYFPSQMLRTGNNFQFSYEFENVPFHSSYAHSQSLDRLMNPLIDQYLYYLSKTINGSGQNQQTLKFSVAGPSNMAVQGRNYIPGPSYRQQRVSTTVTQNNNSEFAWPGASSWALNGRNSLMNPGPAMASHKEGEDRFFPLSGSLIFGKQGTGRDNVDADKVMITNEEEIKTTNPVATESYGQVATNHQSAQAQAQTGWVQNQGILPGMVWQDRDVYLQGPIWAKIPHTDGNFHPSPLMGGFGMKHPPPQILIKNTPVPADPPTAFNKDKLNSFITQYSTGQVSVEIEWELQKENSKRWNPEIQYTSNYYKSNNVEFAVNTEGVYSEPRPIGTRYLTRNL

SEQ ID NO: 731 - protein, 736 aa, Artificial Sequence; identical to SEQ ID NO: 730
  Description of Artificial Sequence: Synthetic polypeptide

SEQ ID NO: 732 - protein, 736 aa, Artificial Sequence
  Description of Artificial Sequence: Synthetic polypeptide
MAADGYLPDWLEDNLSEGIREWWALKPGAPQPKANQQHQDNARGLVLPGYKYLGPGNGLDKGEPVNAADAAALEHDKAYDQQLKAGDNPYLKCNHADAEFQERLKEDTSFGGNLGRAVFQAKKRLLEPLGLVEEAAKTAPGKKRPVEQSPQEPDSSAGIGKSGAQPAKKRLNFGQTGDTESVPDPQPIGEPPAAPSGVGSLTMASGGGAPVADNNEGADGVGSSSGNWHCDSQWLGDRVITTSTRTWALPTYNNHLYKQISNSTSGGSSNDNAYLDYSTPWGYFDFNRFHCHFSPRDWQRLINNNWGFRPKRLNFKLFNIQVKEVTDNNGVKTIANNLTSTVQVFTDSDYQLPYVLGSAHEGCLPPFPADVFMIPQYGYLTLNDGSQAVGRSSFYCLEYFPSQMLRTGNNFQFSYEFENVPFHSSYAHSQSLDRLMNPLIDQYLYYLSKTINGSGQNQQTLKFSVAGPSNMAVQGRNYIPGPSYRQQRVSTTVTQNNNSEFAWPGASSWALNGRNSLMNPGPAMASHKEGEDRFFPLSGSLIFGKQGTGRDNVDADKVMITNEEEIKTTNPVATESYGQVATNHQSAQAQAQTGWVQNQGILPGMVWQGRDVYLQGPIWAKIPHTDGNFHPSPLMGGFGMKHPPPQILIKNTPVPADPPTAFNKDKLNSFITQYSTGQVSVEIEWELQKENSKRWNPEIQYTSNYYKSNNVEFAVNTEGVYSEPRPIGTRYLTRNL

SEQ ID NO: 733 - protein, 736 aa, Artificial Sequence; identical to SEQ ID NO: 730
  Description of Artificial Sequence: Synthetic polypeptide

SEQ ID NO: 734 - protein, 736 aa, Artificial Sequence
  Description of Artificial Sequence: Synthetic polypeptide
MAADGYPPDWLEDNLSEGIREWWALKPGAPQPKANQQHQDNARGLVLPGYKYLGPGNGLDKGEPVNAADAAALEHDKAYDQQLKAGDNPHLKYNHADAEFQERLKEDTSFGGNLGRAVFQAKKRLLEPLGLVEEAAKTAPGKKRPVEQSPQEPDSSAGIGKSGAQPAKKRLNFGQTGDTESVPDPQPIGEPPAAPSGVGSLTMASGGGAPVADNNEGADGVGSSSGNWHCDSQWLGDRVITTSTRTWALPTYNNHLYKQISNSTSGGSSNDNAYFGYSTPWGYFDFNRFHCHFSPRDWQRLINNNWGFRPKRLNFKLFNIQVKEVTDNNGVKTIANNLTSTVQVFTDSDYQLPYVLGSAHEGCLPPFPADVFMIPQYGYLTLNDGSQAVGRSSFYCLEYFPSQMLRTGNNFQFSYEFENVPFHSSYAHSQSLDRLMNPLIDQYLYYLSKTINGSGQNQQTLKFSVAGPSNMAVQGRNYIPGPSYRQQRVSTTVTQNNNSEFAWPGASSWALNGRNSLMNPGPAMASHKEGEDRFFPLSGSLIFGKQGTGRDNVDADKVMITNEEEIKTTNPVATESYGQVATNHQSAQAQAQTGWVQNQGILPGMVWQDRDVYLQGPIWAKIPHTDGNFHPSPLMGGFGVKHPPPQILIKNTPVPADPPTAFNKDRLNSFITQYSTGQVSVEIEWELQKENSKRWNPEIQYTSNYYKSNNVEFAVNTEGVYSEPRPIGTRYLTRNL

SEQ ID NO: 735 - protein, 736 aa, Artificial Sequence
  Description of Artificial Sequence: Synthetic polypeptide
MAADGYLPDWLEDNLSEGIREWWALKPGAPQPKANQQHQDNARGLVLPGYKYLGPGNGLDKGEPVNAADAAALEHDKAYDQQLKAGDNPYLKYNHADAEFQERLKEDTSFGGNLGRAVFQAKKRLLEPLGLVEEAAKTAPGKKRPVEQSPQEPDSSAGIGKSGAQPAKKRLNFGQTGDTESVPDPQPIGEPPAAPSGVGSLTMASGGGAPVADNNEGADGVGSSSGNWHCDSQWLGDRVITTSTRTWALPTYNNHLYKQISNSTSGGSSNDNAYFGYSTPWGYFDFNRFHCHFSPRDWQRLINNNWGFRPKRLNFKLFNIQVKEVTDNNGVKTIANNLTSTVQVFTDSDYQLPYVLGSAHEGCLPPFPADVFMIPQYGYLTLNDGSQAVGRSSFYCLEYFPSQMLRTGNNFQFSYEFENVPFHSSYAHSQSLDRLMNPLIDQYLYYLSKTINGSGQNQQTLKFSVAGPSNMAVQGRNYIPGPSYRQQRVSTTVTQNNNSEFAWPGASSWALNGRNSLMNPGPAMASHKEGEDRFFPLSGSLIFGKQGTGRDNVDADKVMITNEEEIKTTNPVATESYGQVATNHQSAQAQAQTGWVQNQGILPGMVWQDRDVYLQGPIWAKIPHTDGNFHPSPLMGGFGVKHPPPQILIKNTPVPADPPTAFNKDKLNSFITQYSTGQVSVEIEWELQKENSKRWNPEIQYTSNYYKSNNVEFAVNTEGVYSEPRPIGTRYLTRNL

SEQ ID NO: 736 - protein, 736 aa, Artificial Sequence
  Description of Artificial Sequence: Synthetic polypeptide
MAADGYLPDWLEDNLSEGIREWWALKPGAPQPKANQQHQDNARGLVLPGYKYLGPGNGLDKGEPVNAADAAALEHDKAYDQQLKAGDNPYLKYNHADAEFQERLKEDTSFGGNLGRAVFQAKKRLLEPLGLVEEAAKTAPGKKRPVEQSPQEPDSSAGIGKSGAQPAKKRLNFGQTGDTESVPDPQPIGEPPAAPSGVGSLTMASGGGAPVADNNEGADGVGSSSGNWHCDSQWLGDRVITTSTRTWALPTYNNHLYKQISNSTSGGSSNDNAYFGYSTPWGYFDFNRFHCHFSPRDWQRLTNNNWGFRPKRLNFKLFNIQVKEVTDNNGVKTIANNLTSTVQVFTDSDYQLPYVLGSAHEGCLPPFPADVFMIPQYGYLTLNDGSQAVGRSSFYCLEYIPSQMLRTGNNFQFSYEFENVPFHSSYAHSQSLDRLMNPLIDQYLYYLSKTINGSGQNQQTLKFSVAGPSNMAVQGRNYIPGPSYRQQRVSTTVTQNNNSEFAWPGASSWALNGRNSLMNPGPAMASHKEGEDRFFPLSGSLIFGKQGTGRDNVDADKVMITNEEEIKTTNPVATESYGQVATNHQSAQAQAQTGWVQNQGILPGMVWQDRDVYLQGPIWAKIPHTDGNFHPSPLMGGFGVKHPPPQILIKNTPVPADPPTAFNKDKLNSFITQYSTGQVSVEIEWELQKENSKRWNPEIQYTSNYYKSNNVEFAVNTEGVYSEPRPIGTRYLTRNL

SEQ ID NO: 737 - protein, 736 aa, Artificial Sequence
  Description of Artificial Sequence: Synthetic polypeptide
MAADGYLPDWLEDNLSEGIREWWALKPGAPQPKANQQHQDNARGLVLPGYKYLGPGNGLDKGEPVNAADAAALEHDKAYDQQLKAGDNPYLKYNHADAEFQERLKEDTSFGGNLGRAVFQAKKRLLEPLGLVEEAAKTAPGKKRPVEQSPQEPDSSAGIGKSGAQPAKKRLNFGQTGDTESVPDPQPIGEPPAAPSGVGSLTMASGGGAPVADNNEGADGVGSSSGNWHCDSQWLGDRVITTSTRTWALPTYNNHLYKQISNSTSGGSSNDNAYFGYSTPWGYFDFNRFHCHFSPRDWQRLINNNWGFRPKRLNFKLFNIQVKEVTDNNGVKTIANNLTSTVQVFTDSDYQLPYVLGSAHEGCLPPFPADVFMIPQYGYLTLNDGSQAVGRSSFYCLEYFPSQMLRTGNNFQFSYEFENVPFHSSYAHSQSLDRLMNPLIDQYLYYLSKTINGSGQNQQTLKFSVAGPSNMAVQGRNYIPGPSYRQQRVSTTVTQNNNSEFAWPGASSWALNGRNSLMNPGPAMASHKEGEDRFFPLSGSLISGKQGTGRDNVDANKVMITNEEEIKTTNPVATESYGQVATNHQSAQAQAQTGWVQNQGILPGMVWQDRDVYLQGPIWAKIPHTDGNFHPSPLMGGFEMKHPPPQILIKNTPVPADPPTAFNKDKLNSFITQYSTGQVSVEIEWELQKENSKRWNPEIQYTSNYYKSNNVEFAVNTEGVYSEPRPIGTRYLTRNL

SEQ ID NO: 738 - protein, 736 aa, Artificial Sequence
  Description of Artificial Sequence: Synthetic polypeptide
MAADGYLPDWLEDNLSEGIREWWALKPGAPQPKANQQHQDNARGLVLPGYKYLGPGNGLDKGEPVNAADAAALEHDKAYDQQLKAGDNPYLKYNHADAEFQERLKEDTSFGGNLGRAVFQAKKRLLEPLGLVEEAAKTAPGKKRPVEQSPQEPDSSAGIGKSGAQPAKKRLNFGQTGDTESVPDPQPIGEPPAAPSGVGSLTIASGGGAPVADNNEGADGVGSSSGNWHCDSQWLGDRVITTSTRTWALPTYNNHLYKRISNSTSGGSSNDNAYFGYSTPWGYFDFNRFHCHFSPRDWQRLINNNWGFRPKRLNFKLFNIRVKEVTDNNGVKTITNNLTSTVQVFTDSDYQLPYVLGSAHEGCLPPFPADVFMIPQYGYLTLNDGSQAVGRSSFYCLEYFPSQMLRTGNNFQFSYEFENVPFHSSYAHSQSLDRLMNPLIDQYLYYLSKTINGSGQNQQTLKFSVAGPSNMAVQGRNYIPGPSYRQQRVSTTVTRNNNSEFAWPGASSWALNGRNSLMNPGPAMASHKEGEDRFFPLSGSLIFGKQGTGRDNVDADKVMITNEEEIKTTNPVATESYGQVATNHQSAQAQAQTGWVQNQGILPGMVWQDRDVYLQGPIWAKIPHTDGNFHPSPLMGGFGVKHPPPQILIKNTPVPADPPTAFNKDKLNSFITQYSTGQVSVEIEWELQKENSKRWNPEIQYTSNYYKSNNVEFAVNTEGVYSEPRPIGTRYLTRNL

SEQ ID NO: 739 - protein, 736 aa, Artificial Sequence
  Description of Artificial Sequence: Synthetic polypeptide
MAADGYLPDWLEDNLSEGIREWWALKPGAPQPKANQQHQDNARGLVLPGYKYLGPGNGLDKGEPVNAADAAALEHDKAYDQQLKAGDNPYLKYNHADAEFQERLKEDTSFGGNLGRAVFQAKKRLLEPLGLVEEAAKTAPGKKRPVEQSPQEPDSSAGIGKSGAQPAKKRLNFGQTGDTEPVPDPQPIGEPPAAPSGVGSLTMASGGGAPVADNNEGADGVGSSSGNWHCDSQWLGDRVITTSTRTWALPTYNNHLYKQISNSTSGGSSNDNAYFGYSTPWGYFDFNRFHCHFSPRDWQRLINNNWGFRPKRLNFKLFNIQVKEVTDNNGVKTIANNLTSTVQVFTDSDYQLPYVLGSAHEGCLPPFPAGVFMIPQYGYLTLNDGSQAVGRSSFYCLEYFPSQMLRTGNNFQFSYEFENVPFHSSYAHSQSLDRLMNPLIDQYLYYLSKTINGSGQNQQTLKFSVAGPSNMAVQGRNYIPGPSYRQQRVSTTATQNNNSEFAWPGASSWALNGRNSLMNPGPAMASHKEGEDRFFPLSGSLIFGKQGTGRDNVDADKVMITNEEEIKTTNPVATESYGQVATNHQSAQAQAQTGWVQNQGILPGMVWQDRDVYLQGPIWAKIPHTDGNFHPSPLMGGFGMKHPPPQILIKNTPVPADPPTAFNKDKLNSFITQYSTGQVSVEIEWELQKENSKRWNPEIQYTSNYYKSNNVEFAVNTEGVYSEPRPIGTRYLTRNL

SEQ ID NO: 740 - protein, 736 aa, Artificial Sequence
  Description of Artificial Sequence: Synthetic polypeptide
MAADGYLPDWLEDNLSEGIREWWALKPGAPQPKANQQHQDNARGLVLPGYKYLGPGNGLDKGEPVNAADAAALEHDKAYDQQLKAGDNPYLKYNHADAGFQERLKEDTSFGGNLGRAVFQAKKRLLEPLGLVEEAAKTAPGKKRPVEQSPQEPDSSAGIGKSGAQPAKKRLNFGQTGDTESVPVPQPIGEPPAAPSGVGSLTMASGGGAPVADNNEGADGVGSSSGNWHCDSQWLGDRVITTSTRTWALPTYNNHLYKQISNSTSGGSSNDNAYFGYSTPWGYFDFNRFHCHFSPRDWQRLINNNWGFRPKRLNFKLFNIQVKEVTDNNGVKTIANNLTSTVQVFTDSDYQLPYVLGSAHEGCLPPFPADVFMIPQYGYLTLNDGSQAVGRSSFYCLEYFPSQMLRTGNNFQFSYEFENVPFHSSYAHSQSLDRLMNPLIDQYLYYLSKTINGSGQNQQTLKFSVAGPSNMAVQGRNYIPGPSYRQQRVSTTVTQNNNSEFAWPGASSWALNGRNSLMNPGPAMASHKEGEDRFFPLSGSLIFGKQGAGRDNVDADKVMITNEEEIKTTNPVATESYGQVATNHQSAQAQAQTGWVQNQGILPGMVWQDRDVYLQGPIWAKIPHTDGNFHPSPLMGGFGMKHPPPQILIKNTPVPADPPTAFNKDKLNSFITQYSTGQVSVEIEWELQKENSKRWNPEIQYTSNYYKSNNVEFAVNTEGVYSEPRPIGTRYLTRNL

SEQ ID NO: 741 - protein, 736 aa, Artificial Sequence
  Description of Artificial Sequence: Synthetic polypeptide
  MOD_RES (126)..(126): Any naturally occurring amino acid
MAADGYLPDWLEDNLSEGIRERWALKPGAPQPKANQQHQDNARGLVLPGYKYLGPGNGLDKGEPVNAADAAALEHDKAYDQQLKAGDNPYLKYNHADAEFQERLKEDTSFGGNLGRAVFQAKKRLXEPLGLVEEAAKTAPGKKRPVEQSPQEPDSSAGIGKSGAQPAKKRLNFGQTGDTESVPDPQPIGEPPAAPSGVGSLTMASGGGAPVADNNEGADGVGSSSGNWHCDSQWLGDRVITTSTRTWALPTYNNHLYKQISNSTSGGSSNDNAYFGYSTPWGYFDFNRFHCHFSPRDWQRLINNNWGFRPKRLNFKLFNIQVKEVTDNNGVKTIANNLTSTVQVFTDSDYQLPYVLGSAHEGCLPPFPADVFMIPQYGYLTLNDGSQAVGRSSFYCLEYFPSQMLRTGNNFQFSYEFENVPFHSSYAHSQSPDRLMNPLIDQYLYYLSKTINGSGQNQQTLKFSVAGPSNMAVQGRNYIPGPSYRQQRVSTTVTQNNNSEFAWPGASSWALNGRNSLMNPGPAMASHKEGEDRFFPLSGSLIFGKQGTGRDNVDADKVMITNEEEIKTTNPVATESYGQVATNHQSAQAQAQTGWVQNQGILPGMVWQDRDVYLQGPIWAKIPHTDGNFHPSPLMGGFGVKHPPPQILIKNTPVPADPPTAFNKDKLNSFITQYSTGQVSVEIEWELQKENSKRWNPEIQYTSNYYKSNNVEFAVNTEGVYSEPRPIGTRYLTRNL

SEQ ID NO: 742 - protein, 736 aa, Artificial Sequence
  Description of Artificial Sequence: Synthetic polypeptide
MAADGYLPDWLEDNLSEGIREWWALKPGAPQPKANQQHQDNARGLVLPGYKYLGPGNGLDKGEPVNAADAAALEHDKAYDQQLKAGDNPYLKYNHADAEFQERLKEDTSFGGNLGRAVFQAKKRLLEPLGLVEEAAKTAPGKKRPVEQSPQEPDSSAGIGKSGAQPAKKRLNFGQTGDTESVPDPQPIGEPPAAPSGVGSLTMASGGGAPVADNNEGADGVGSSSGNWHCDSQWLGDRVITTSTRTWALPTYNNHLYKQISNSTSGGSSNDNAYLGYSTPWGYFDFNRFHCHFSPRDWQRLINNNWGFRPKRLNFKLFNIQVKEVTDNNGVKTIANNLTSTVQVFTDSDYQLPYVLGSAHEGCLPPFPADVFMIPQYGYLTLNDGSQAVGRSSFYCLEYFPSQMLRTGNNFQFSYEFENVPFHSSYAHSQSLDRLMNPLIDQYLYYLSKTINGSGQNQQTLKFSVAGPSNMAVQGRNYIPGPSYRQQRVSTTVTQNNNSEFAWPGASSWALNGRNSLMNPGPAMASHKEGEDRFFPLSGSLIFGKQGTGRDNVDADKVMITNEEEIKTTNPVATESYGQVATNHQSAQAQAQTGWVQNQGILPGMVWQDRDVYLQGPIWAKIPHTDGNFHPSPLMGGFGMKHPPPQILIKNTPVPADPPTAFNKDKLNSFITQYSTGQVSVEIEWELQKENSKRWNPEIQYTSNYYKSNNVEFAVNTEGVYSEPRPIGTRYLTRNL

SEQ ID NO: 743 - protein, 736 aa, Artificial Sequence
  Description of Artificial Sequence: Synthetic polypeptide
MAADGYLPDWLEDNLSEGIREWWALKPGAPQPKANQQHQDNARGLVLPGYKYLGPGNGLDKGEPVNAADAAALEHDKAYDQQLKAGDNPYLKYNHADAEFQERLKEDTSFGGNLGRAVFQAKKRLLEPLGLVEEAAKTAPGKKRPVEQSPQEPDSSAGIGKSGAQPAKKRLNFGQTGDTESVPDPQPIGEPPAAPSGVGSLTMASGGGAPVADNNEGADGVGSSSGNWHCDSQWLGDRVITTSTRTWALPTYNNHLYKQISNSTSGGSSNDNAYFGYSTPWGYFDFNRFHCHFSPRDWQRLINNNWGFRPKRLNFKLFNIQVKEVTDNNGVKTIANNLTSTVQVFTDSDYQLPYVLGSAHEGCLPPFPADVFMIPQYGYLTLNDGSQAVGRSSFYCLEYFPSQMLRTGNNFQFSYEFENVPFHSSYAHSQSLDRLMNPLIDQYLYYLSKTINGSGQNQQTLKFSVAGPSNMAVQGRNYIPGPSYRQQRVSTTVTQNNNSEFAWPGASSWALNGRNSLMNPGPAMASHKEGEDRFFPLSGSLIFGKQGTGRDNVDADKVMITNEEEIKTTNPVATESYGQVATNHQSAQAQAQTGWVQNQGILPGMVWQDRDVYLQGPIWAKIPHTDGNFHPSPLMGGFGMKHPPPQILIKNTPVPADPPTAFNKDKLDSFITQYSTGQVSVEIEWELQKENSKRWNPVIQYTSNYYKSNNVEFAVNTEGVYSEPRPIGTRYLTRNL

SEQ ID NO: 744 - protein, 736 aa, Artificial Sequence
  Description of Artificial Sequence: Synthetic polypeptide
MAADGYLPDWLEDNLSEGIREWWDLKPGAPKPKANQQKQDDGRGLVLPGYKYLGPFNGLDKGEPVNAADAAALEHDKAYDQQLKAGDNPYLRYNHADAEFQERLQEDTSFGGNLGRAVFQAKKRVLEPLGLVEEGAKTAPGKKRPVEQSPQEPDSSSGIGKTGQQPAKKRLNFGQTGDSESVPDPQPLGEPPATPAAVGPTTMASGGGAPMADNNEGVDGVGNASGNWHCDSTWLGDRVITTSTRTWALPTYNNHLYKQISSASTGASNDNHYFGYSTPWGYFDFNRFHCHFSPRDWQRLINNNWGFRPKRLNFKLFNIQVKEVTTNDGVTTIANNLTSTVQVFSDSEYQLPYVLGSAHQGCLPPFPADVFMIPQYGYLTLNNGSQAVGRSSFYCLEYFPSQMLRTGNNFTFSYTFEEVPFHSSYAHSQSLDRLMNPLIDQYLYYLNRTQNQSGSAQNKDLLFSRGSPAGMSVQPKNWLPGPCYRQQRVSKTKTDNNNSNFTWTGASKYNLNGRESIINPGTAMASHKDDEDKFFPMSGVMIFGKESAGASNTALDNVMITDEEEIKATNPVATERFGTVAVNFQSSSTDPATGDVHAMGALPGMVWQDRDVYLQGPIWAKIPHTDGHFHPSPLMGGFGLKNPPPQILIKNTPVPANPPAEFSATKLASFITQYSTGQVSVEIEWELQKENSKRWNPEVQYTSNYAKSANVDFTVDNNGLYTEPRPIGTRYLTRPL

SEQ ID NO: 745 - protein, 736 aa, Artificial Sequence
  Description of Artificial Sequence: Synthetic polypeptide
MAADGYLPDWLEDNLSEGIREWWDLKPGAPKPKANQQKQDDGRGLVLPGYKYLGPFNGLDKGEPVNAADAAALEHDKAYDQQLKAGDNPYLRYNHADAEFQERLQEDTSFGGNLGRAVFQAKKRVLEPLGLVEEGAKTAPGKRRPVEQSPQEPDSSSGIGKTGQQPAKKRLNFGQTGDSESVPDPQPLGEPPATPAAVGPTTMASGGGAPMADNNEGADGVGNASGNWHCDSTWLGDRVITTSTRTWALPTYNNHLYKQISSASTGASNDNHYFGYSTPWGYFDFNRFHCHFSPRDWQRLINNNWGFRPKRLNFKLFNIQVKEVTTNDGVTTIANNLTSTVQVFSDSEYQLPYVLGSAHQGCLPPFPADVFMIPQYGYLTLNNGSQAVGRSSFYCLEYFPSQMLRTGNNFTFSYTFEEVPFHSSYAHSQSLDRLMNPLIDQYLYYLNRTQNQSGSAQNKDLLFSRGSPAGMSVQPKNWLPGPCYRQQRVSKTKTDNNNSNFTWTGASKYNLNGRESIINPGTAMASHKDDEDKFFPMSGVMIFGKESAGASNTALDNVMITDEEEIKATNPVATERFGTVAVNFQSSSTDPATGDVHAMGALPGMVWQDRDVYLQGPIWAKIPHTDGHFHPSPLMGGFGLKNPPPQILIKNTPVPANPPAEFSATKFASFITQYSTGQVSVEIEWELQKENSKRWNPEVQYTSNYAKSANVDFTVDNNGLYTEPRPIGTRYLTRPL

SEQ ID NO: 746 - protein, 736 aa, Artificial Sequence
  Description of Artificial Sequence: Synthetic polypeptide
MAADGYLPDWLEDNLSEGIREWWDLKPGAPKPKANQQKQDDGRGLVLPGYKYLGPFNGLDKGEPVNAADAAALEHDKAYDQQLKAGDNPYPRYNHADAEFQERLQEDTSFGGNLGRAVFQAKKRVLEPLGLVGEGAKTAPGKKRPVEQSPQEPDSSSGIGKTGQQPAKKRLNFGQTGDSESVPDPQPLGEPPATPAAVGPTTMASGGGAPMADNNEGADGVGNASGNWHCDSTWLGDRVITTSTRTWALPTYNNHLYKQISSASTGASNDNHYFGYSTPWGYFDFNRFHCHFSPRDWQRLINNNWGFRPKRLNFKLFNIQVKEVTTNDGVTTIANNLTSTVQVFSDSEYQLPYVLGSAHQGCLPPFPADVFMIPQYGYLTLNNGSQAVGRSSFYCLEYFPSQMLRTGNNFTFSYTFEEVPFHSSYAHSQSLDRLMNPPIDQYLYYLNRTQNQSGSAQNKDLLFSRGSPAGMSVQPKNWLPGPCYRQQRVSKTKTDNNNSNFTWTGASKYNLNGRESIINPGTAMASHKDDEDKFFPMSGVMIFGKESAGASNTALDNVMITDEEEIKATNPVATERFGTVAVNFQSSSTDPATGDVHAMGALPGMVWQDRDVYLQGPIWAKIPHTDGHFHPSPLMGGFGLKNPPPQILIKNTPVPANPPAEFSATKFASFITQYSTGQVSVEIEWELQKENSKRWNPEVQYTSNYAKSANVDFTVDNNGLYTEPRPIGTRYLTRPL

SEQ ID NO: 747 - protein, 736 aa, Artificial Sequence
  Description of Artificial Sequence: Synthetic polypeptide
MAADGYLPDWLEDNLSEGIREWWDLKPGAPKPKANQQKQDDGRGLVLPGYKYLGPFNGLDKGEPVNAADAAALEHDKAYDQQLKAGDNPYLRYNHADAEFQERLQEDTSFGGNLGRAVFQAKKRVLEPLGLVEEGAKTAPGKKRPVEQSPQEPDSSSGIGKTGQQPAKKRLNFGQTGDSESVPDPRPLGEPPATPAAVGPTTMASGGGAPMADNNEGADGVGNASGNWHCDSTWLGDRVITTSTRTWALPTYNNHLYKQISSASTGASNDNHYFGYSTPWGYFDFNRFHCHFSPRDWQRLINNNWGFRPKRLNFKLFNIQVKEVTTNDGVTTIANNLTSTVQVFSDSEYQLPYVLGSAHQGCLPPFPADVFMIPQYGYLTLNNGSQAVGRSSFYCLEYFPSQMLRTGNNFTFSYTFEEVPFHSSYAHSQSLDRLMNPLIDQYLYYLNRTQNQSGSAQNKDLLFSRGPPAGMSVQPKNWLPGPCYRQQRVSKTKTDNNNSNFTWTGASKYNLNGRESIINPGTAMASHKDDEDKFFPMSGVMIFGKESAGASNTALDNVMITDEEEIKATNPVATERFGTVAVNFQSSSTDPATGDVHAMGALPGMVWQDRDVYLQGPIWAKIPHTDGHFHPSPLMGGFGLKNPPPQILIKNTPVPANPPAEFSATKFASFITQYSTGQVSVEIEWELQKENSKRWNPEVQYTSNYAKSANVDFTVDNNGLYTEPRPIGTRYLTRPL

SEQ ID NO: 748 - protein, 736 aa, Artificial Sequence
  Description of Artificial Sequence: Synthetic polypeptide
MAADGYLPDWLEDNLSEGIREWWDLKPGAPKPKANQQKQDDGRGLVLPGYKYLGPFNGLDKGEPVNAADAAALEHDKAYDQQLKAGDNPYLRYNHADAEFQERLQEDTSFGGNLGRAVFQAKKRVLEPLGLVEEGAKTAPGKKRPVEQSPQEPDSSSGIGKTGQQPAKKRLNFGQTGGSESVPDPQPLGEPPATPAAVGPTTMASGGGAPMADNNEGADGVGNASGNWHCDSTWLGDRVITTSTRTWALPTYNNHLYKQISSASTGASNDNHYFGYSTPWGYFDFNRFHCHFSPRDWQRLINNNWGFRPKRLNFKLFNIQVKEVTTNDGVTTIANNLTSTVQVFSDSEYQLPYVLGSAHQGCLPPFPADVFMIPQYGYLTLNNGSQAVGRSSFYCLEYFPSQMLRTGNNFTFSYTFEEVPFHSSYAHSQSLDRLMNPPIDQYLYYLNRTQNQSGSAQNKDLLFSRGSPAGMSVQPKNWLPGPCYRQQRVSKTKTDNNNSNFTWTGASKYNLNGRESIINPGTAMASHKDDEDKFFPMSGVMIFGKESAGASNTALDNVMITDEEEIKATNPVATERFGTVAVNFQSSSTDPATGDVHAMGALPGMVWQDRDVYLQGPIWAKIPHTDGHFHPSPLMGGFGLKNPPPQILIKNTPVPANPPAEFSATKFASFITQYSTGQVSVEIEWELQKENSKRWNPEVQYTSNYAKSANVDFTVDNNGLYTEPRPIGTRYLTRPL

SEQ ID NO: 749 - protein, 736 aa, Artificial Sequence
  Description of Artificial Sequence: Synthetic polypeptide
MAADGYLPDWLEDNLSEGIREWWDLKPGAPKPKANQQKQDDGRGLVLPGYKYLGPFNGLDKGEPVNAADAAALEHDKAYDQQLKAGDNPYLRYNHADAEFQERLQEDTSFGGNLGRAVFQAKKRVLEPLGLVEEGAKTAPGKKRPVEQSPQEPDSSSGIGKTGQQPAKKRLNFGQTGDSESVPDPQPLGEPPATPAAVGPTTMASGGGAPMADNNEGADGVGNASGNWHCDSTWLGDRVITTSTRTWALPTYNNHLYKQISSASTGASNDNHYFGYSTPWGYFDFNRFHCHFSPRDWQRLINNNWGFRPKRLNFKLFNIQVKEVTTNDGVTTIANNLTSTVQVFSDSEYQLPYVLGSAHQGCLPPFPADVFMIPQYGYLTLNNGSQAVGRSSFYCLEYFPSQMLRTGNNFTFSYTFEEVPFHSSYAHSQSLDRLMNPLIDQYLYYLNRTQNQSGSAQNKDLLFSRGSPAGMSVQPKNWLPGPCYRQQRVSKTKTDNNNSNFTWTGASKYNLNGRESIINPGTAVASHKDDEDKFFPMSGVMIFGKESAGASNTALDNVMITDEEEIKATNPVATERFGTVAVNFQSSSTDPATGDVHAMGALPGMVWQDRDVYLQGPIWAKIPHTDGHFHPSPLMGGFGLKNPPPQILIKNTPVPANPPAEFSATKFASFITQYSTGQVSVEIEWELQKENSKRWNPEVQYTSNYAKSANVDFTVDNNGLYTEPRPIGTRYLTRPL

SEQ ID NO: 750 - protein, 736 aa, Artificial Sequence
  Description of Artificial Sequence: Synthetic polypeptide
MAADGYLPDWLEDNLSEGIREWWDLKPGAPKPKANQQKQDDGRGLVLPGYKYLGPFNGLDKGEPVNAADAAALEHDKAYDQQLKAGDNPYLRYNHADAEFQERLQEDTSFGGNLGRAVFQAKKRVLEPLGLVEEGAKTAPGKKRPVEQSPQEPDSSSGIGKTGQQPAKKRLNFGQTGDSESVPDPQPLGEPPATPAAVGPTTMASGGGAPMADNNEGADGVGNASGNWHCDSTWLGDRVITTSTRTWALPTYNNHLYKQISSASTGASNDNHYFGYSTPWGYFDFNRFHCHFSPRDWQQLINNNWGFRPKRLNFKLFNIQVKEVTTNDGVTTIANNLTSTVQVFSDSEYQLPYVLGSAHQGCLPPFPADVFMIPQYGYLTLNNGSQAVGRSSFYCLEYFPSQMLRTGNNFTFSYTFEEVPFHSSYAHSQSLDRLMNPLIDQYLYYLNRTQNQSGSAQNKDLLFSRGSPAGMSVQPKNWLPGPCYRQQRVSKTKTDNNNSNFTWTGASKYNLNGRESIINPGTAMASHKDDEDKFFPMSGVMIFGKESAGASNTALDNVMITDEEEIKATNPVATERFGTVAVNFQSTSTDPATGDVHAMGALPGMVWQDRDVYLQGPIWAKIPHTDGHFHPSPLMGGFGLKNPPPQILIKNTPVPANPPAEFSATKFASFITQYSTGQVSVEIEWELQKENSKRWNPEVQYTSNYAKSADVDFTVDNNGLYTEPRPIGTRYLTRPL

SEQ ID NO: 751 - protein, 736 aa, Artificial Sequence
  Description of Artificial Sequence: Synthetic polypeptide
MAADGYLPDWLEDNLSEGIREWWDLKPGAPKPKANQQKQDDGRGLVLPGYKYLGPFNGLDKGEPVNAADAAALEHDKAYDQQLKAGDNPYLRYNHADAEFQERLQEDTSFGGNLGRAVFQAKKRVLEPLGLVEEGAKTAPGKKRPVEQSPQEPDSSSGIGKTGQQPAKKRLNFGQTGDSESVPDPQPLGEPPATPAAVGPTTMASGGGAPMADNNEGADGVGNASGNWHCDSTWLGDRVITTSTRTWALPTYNNHLYKQISSASTGASNDNHYFGYSTPWGYFDFNRFHCHFSPRDWQRLINNNWGFRPKRLNFKLFNIQVKEVTTNDGVTTIANNLTSTVQVFSDSEYQPPYVLGSAHQGCLPPFPADVFMIPQYGHLTLNNGSQAVGRSSFYCLEYFPSQMLRTGNNFTFSYTFEEVPFHSSYAHSQSLDRLTNPLIDQYLYYLNRTQNQSGSAQNKDLLFSRGSPAGMSVQPKNWLPGPCYRQQRVSKTKTDNNNSNFTWTGASKYNLNGRESIINPGTAMASHKDDEDKFFPMSGVMIFGKESAGASNTALDNVMITDEEEIKATNPVATERFGTVAVNFQSSSTDPATGDVHAMGALPGMVWQDRDVYLQGPIWAKIPHTDGHFHPSPLMGGFGLKNPPPQILIKNTPVPANPPAEFSATKFASFITQYSTGQVSVEIEWELQKENSKRWNPEVQYTSNYAKSANVDFTVDNNGLYTEPRPIGTRYLTRPL

SEQ ID NO: 752 - protein, 736 aa, Artificial Sequence
  Description of Artificial Sequence: Synthetic polypeptide
MAADGYLPDWLEDNLSEGIREWWDLKPGAPKPKANQQEQDDGRGLVLPGYKYLGPFNGLDKGEPVNAADAAALEHDKAYDQQLKAGDNPYLRYNHADAEFQERLQEDTSFGGNLGRAVFQAKKRVLEPLGLVEEGAKTAPGKKRPVEQSPQEPDSSSGIGKTGQQPAKKRLNFGQTGDSESVPDPQPLGEPPATPAAVGPTTMASGGGAPMADNNEGADGVGNASGNWHCDSTWLGDRVITTSTRTWALPTYNNHLYKQISSASTGASNDNHYFGYSTPWGYFDFNRFHCHFSPRDWQRLINNNWGFRPKRLNFKLFNIQVKEVTTNDGVTTIANNLTSTVQVFSDSEYQLPYVLGSAHQGCLPPFPADVFMIPQYGYLTLNNGSQAVGRSSFYCLEYFPSQMLRTGNNFTFSYTFEEVPFHSSYAHSQSLDRLMNPLIDQYLYYLNRTQNQSGSAQNKDLLFSRGSPAGMSVQPKNWLPGPCYRQQRVSKTKTDNNNSNFTWTGASKYNLNGRESIINPGTAMASHKDDEDKFFPMSGVMIFGKESAGASNTALDNVMITDEEEIKATNPVATERFGTVAVNFQSSSTDPATGDVHATGTLPGMVWQDRDVYLQGPIWAKIPHTDGHFHPSPLMGGFGLKNPPPQILIKTTPVPANPPAEFSATKFASFITQYSTGQVSVEIEWELQKENSKRWNPEVQYTSNYAKSANVDFTVDDNGLYTEPRPIGTRYLTRPL

SEQ ID NO: 753 - protein, 736 aa, Artificial Sequence
  Description of Artificial Sequence: Synthetic polypeptide
MAADGYLPDWLEDNLSEGIREWWDLKPGAPKPKANQQKQDDGRGLVLPGYKYLGPFNGLDKGEPVNAADAAALEHDKAYDQQLKAGDNPYLRYNHADAEFQERLQEDTSFGGNLGRAVFQAKKRVLEPLGLVEEGAKTAPGKKRPVEQSLQEPDSSSGIGKTGQQPAKKRLNFGQTGDSESVPDPQPLGEPPATPAAVGPTTMASGGGAPMADNNEGADGVGNASGNWHCDSTWLGDRVITTSTRTWALPTYNNHLYKQISSASTGASNDNHYFGYSTPWGYFDFNRFHCHFSPRDWQRLINNNWGFRPKRLNFKLFNIQVKEVTTNDGVTTIANNLTSTVQVFSDSEYQLPYVLGSAHQGCLPPFPADVFMIPQYGYLTLNNGSQAVGRSSFYCLEYFPSQMLRTGNNFTFSYTFEEVPFHSSYAHSQSLDRLMNPLIDQYLYYLNRTQNQSGSAQNKDLLFSRGSPAGMSVQPKNWLPGPCYRQQRVSKTKTDNDNSNFTWTGASKYNLNGRESIINPGTAMASHKDDEDKFFPMSGVMIFGKESAGASNTALDNVMITDEEEIKATNPVATERFGTVAVNFQSSSTDPATGDVHAMGALPGMVWQDRDVYLQGPIWAKIPHTDGHFHPSPLMGGFGLKNPPPQILIKNTPVPANPPAEFSATKFASFITQYSTGQVSVEIEWELQKENSKRWNPEVQYTSNYAKSANVDFTVDNNGLYTEPRPIGTRYLTRPL

SEQ ID NO: 754 - protein, 736 aa, Artificial Sequence
  Description of Artificial Sequence: Synthetic polypeptide
MAADGYLPDWLEDNLSEGIREWWDLKPGAPKPKANQQKQDDGRGLVLPGYKYLGPFNGLDKGEPVNAADAAALEHDKAYDQQLKAGDNPYLRYNHADAEFQERLQEDTSFGGNLGRAVFQAKKRVLEPLGLVEEGAKTAPGKKRPVEQSPQEPDSSSGIGKTGQQPAKKRLNFGQTGDSESVPDPQPLGEPPATPAAVGPTTMASGGGAPMADNNEGADGVGNASGNWHCDSTWLGDRVITTSTRTWALPTYNNHLYKQISSASTGASNDNHYFGYSTPWGYFDFNRFHCHFSPRDWQRLINNNWGFRPKRLNFKLFNIQVKEVTTNDGVTTIANNLTSTVQVFSDSEYQLPYVLGSAHQGCLPPFPADVFMIPQYGYLTLNNGSQAVGRSSFYCLEYFPSQMLRTGNNFTFSYTFEEAPFHSSYAHSQSLDRLMNPLIDQYLYYLNRTQNQSGSAQNKDLLFSRGSPAGMSVQPKNWLPGPCYRQQRVSKTKTDNNNSNFTWTGASKYNLNGRESIINPGTAMASHKDDEDKFFPMSGVMIFGKESAGASNTALDNVMITDEEEIKATNPVATERFGTVAVNFQSSSTDPATGDVHAMGALPGMVWQDRDVYLQGPIWAKIPHTDGHFHPSPLMGGFGLKNPPPQILIKNTPVPANPPAEFSATKFASFITQYSTGQVSVEIEWELQKENSKRWNPEVQYTSNYAKSANVDFTVDNNGLYTEPRPVGTRYLTRPL

SEQ ID NO: 755 - protein, 736 aa, Artificial Sequence
  Description of Artificial Sequence: Synthetic polypeptide
MAADGYLPDWLEDNLSEGIREWWDLKPGAPKPKANQQKQDDGRGLVLPGYKYLGPFNGLDKGEPVNAADAAALEHDKAYDQQLKAGDNPYLRYNHADAEFQERLQENTSFGGNLGRAVFQAKKRVLEPLGLVEEGAKTAPGKKRPVEQSPQEPDSSSGIGKTGQQPAKKRLNFGQTGDSESVPDPQPLGEPPATPAAVGPTTMASGGGAPMADNNEGADGVGNASGNWHCDSTWLGDRVITTSTRTWALPTYNNHLYKQISSASTGASNDNHYFGYSTPWGYFDFNRFHCHFPPRDWQRLINNNWGFRPKRLNFKLFNIQVKEVTSNDGVTTIANNLTSTVQVFSDSEYQLPYVLGSAHQGCLPPFPADVFMIPQYGYLTLNNGSQAVGRSSFYCLEYFPSQMLRTGNNFTFSYTFEEVPFHSSYAHSQSLDRLMNPLIDQYLYYLNRTQNQSGSAQNKDLLFSRGSPAGMSVQPKNWLPGPCYRQQRVSKTKTDNNNSNFTWTGASKYNLNGRESIINPGTAMASHKDDEDKFFPMSGVMIFGKESAGASNTALDNVMITDEEEIKATNPVATERFGTVAVNFQSSSTDPATGDVHAMGALPGMVWQDRDVYLQGPIWAKIPHTDGHFHPSPLMGGFGLKNPPPQILIKNTPVPANPPAEFSATKFASFITQYSTGQVSVEIEWELQKENSKRWNPEVQYTSNYAKSANVDFTVDNNGLYTEPRPIGTRYLTRPL

SEQ ID NO: 756 - protein, 736 aa, Artificial Sequence
  Description of Artificial Sequence: Synthetic polypeptide
MAADGYLPDWLEDNLSEGIREWWDLKPGAPKPKANQQKQDDGRGLVLPGYKYLGPFNGLDKGEPVNAADAAALEHDKAYDQQLKAGDNPYLRYNHADAEFQERLQEDTSFGGNLGRAVFQAKKRVLEPLGLVEEGAKTAPGKKRPVEQSPQEPDSSSGIGKTGQQPAKKRLNFGQTGDSESVPDPQPLGEPPATPAAVGPTTMASGGGAPMADNNEGADGVGNASGNWHCDSTWLGDRVITTSTRTWALPTYNNHLYKQISSASTGASNDNHYFGYSTPWGYFDFNRFHCHFSPRDWQRLINNNWGFRPKRLNFKLFNIQVKEVTTNDGVTTIANNLTSTVQVFSDSEYQLPYVLGSAHQGCLPPFPADVFMIPQYGYLTLNNGSQAVGRSSFYCLEYFPSQMLRTGNNFTFSYTFEEVPFHSSYAHSQSLDRLMNPLIDQYLYYLNRTQNQSGSAQNKDLLFSRGSPAGTSVQPKNWLPGPCYRQQRVSKTKTDNNNSNFTWTGASKYNLNGRESIINPGTAMASHKDDEDKFFPMSGVMIFGKESAGASNTALDNVMITDEEEIKATNPVATERFGTVAVNFQSSSTDPATGDVHAMGALPGMVWQDRDVYLQGPIWAKIPHTDGHFHPSPLMGGFGLKNPPPQILIKNTPVPANPPAEFSATKFASFITQYSTGQVSVEIEWELQKENSKRWNPEVQYTSNYAKSANVDFTVDNNGLYTGPRPIGTRYLTRPL

SEQ ID NO: 757 - protein, 736 aa, Artificial Sequence
  Description of Artificial Sequence: Synthetic polypeptide
MAADGYLPDWLEDNLSEGIREWWDLKPGAPKPKANQQKQDDGRGLVLPGYKYLGPFNGLDKGEPVNAADAAALEHDKAYDQQLKAGDNPYLRYNHADAEFQERLQEDTSFGGNLGRAVFQAKKRVLEPLGLVEEGAKTAPGKKRPVEQSPQEPDSSSGIGKTGQQPAKKRLNFGQTGDSESVPDPQPLGEPPATPAAVGPTTMASGGGAPMADNNEGADGVGNAPGNWHCDSTWLGDRVITTSTRTWALPTYNNHLYKQISSASTGASNDNHYFGYSTPWGYFDFNRFHCHFSPRDWQRLINNNWGFRPKRLNFKLFNIQVKEVTTNDGVTTIANNLTSTVQVFSDSEYQLPYVLGSAHQGCLPPFPADVFMIPQYGYLTLNNGSQAVGRSSFYCLEYFPSQMLRTGNNFTFSYTFEEVPFHSSYAHSQSLDRLMNPLIDQYLYYLNRTQNQSGSAQNKDLLFSRGSPAGMSVQPKNWLPGPCYRQQRVSKTKTDNNNSNFTWTGASKYNLNGRESIINPGTAMASHKDDEDKFFPMSGVMIFGKESAGASNTALDNVMITGEEEIKATNPVATERFGTVAVNFQSSSTDPATGDVHAMGALPGMVWQDRDVYLQGPIWAKIPHTDGHFHPSPLMGGFGLKNPPPQILIKNTPVPANPPAEFSATKFASFITQYSTGQVSVEIEWELQKENSKRWNPEVQYTSNYAKSANVDFTVDNNGLYTEPRPIGTRYLTRPL

SEQ ID NO: 758 - protein, 736 aa, Artificial Sequence
  Description of Artificial Sequence: Synthetic polypeptide
MAADGYLPDWLEDNLSEGIREWWDLKPGAPKPKANQQKQDDGRGLVLPGYKYLGPFNRLDKGEPVNAADAAALEHDKAYDQQLKAGDNPYLRYNHADAEFQERLQEDTSFGGNLGRAVFQAKKRVLEPLGLVEEGAKTAPGRKRPVEQSPQEPDSSSGIGKTGQQPAKKRLNFGQTGDSESVPDPQPLGEPPATPAAVGPTTMASGGGAPMADNNEGADGVGNASGNWHCDSTWLGDRVITTSTRTWALPTYNNHLYKQISSASTGASNDNHYFGYSTPWGYFDFNRFHCHFSPRDWQRLINNNWGFRPKRLNFKLFNIQVKEVTTNDGVTTIANNLTSTVQVFSDSEYQLPYVLGSAHQGCLPPFPADVFMIPQYGYLTLNNGGQAVGRSSFYCLEYFPSQMLRTGNNFTFSYTFEEVPFHSSYAHSQSLDRLMNPLIDQYLYYLNRTQNQSGSAQNKDLLFSRGSPAGMSVQPKNWLPGPCYRQQRVSKTKTDNNNSNFTWTGASKYSLNGRESIINPGTAMASHKDDEDKFFPMGGVMIFGKESAGASNTALDNAMITDEEEIKATNPVATERFGTVAVNFQSSSTDPATGDVHAMGALPGMVWQDRDVYLQGPIWAKIPHTDGHFHPSPLMGGFGLKNPPPQILIKNTPVPANPPAEFSATKFASFITQYSTGQVSVEIEWELQKENSKRWNPEVQYTSNYAKSANVDFTVDNNGLYTEPRPIGTRYLTRPL

SEQ ID NO: 759 - protein, 736 aa, Artificial Sequence
  Description of Artificial Sequence: Synthetic polypeptide
MAADGYLPDWLEDNLSEGIREWWDLKPGAPKPKANQQKQDDGRGLVLPGYKYLGPFNGLDKGEPVNAADAAALEHDKAYDQQLKAGDNPYLRYNHADAEFQERLQEDTSFGGNLGRAVFQAKKRVLEPLGLVEEGAKTAPGKKRPVEQSPQEPDSSSGIGKTGQQPAKKRLNFGQTGDSESVPDPQPLGEPPATPAAVGPTTMASGGGAPMADNNEGADGVGNASGNWHCDSTWLGGRVITTSTRTWALPTYNNHLYKQISSASTGASNDNHYFGYSTPWGYFDFNRFHCHFSPRDWQRLINNNWGFRPKRLNFKLFNIQVKEVTTNDGVTTIANNLTSTVQVFSDSEYQLPYVLGSAHQGCLPPFPADVFMIPQYGYLTLNNGSQAVGRSSFYCLEYFPSQMLRTGNNSTFSYTFEEVPFHSSYAHSQSLDRLMNPLIDQYLYYLNRTQNQSGSAQNKDLLFSRGSPAGMSVQPKNWLPGPCYRQQRVSKTKTDNNNSNFTWTGASKYNLNGRESIINPGTAMASHKDDEDKFFPMSGVMIFGKESAGASNTALDNVMITDEEEIKATNPVATERFGTVAVNFQSSSTDPATGDVHAMGTLPGMVWQDRDVYLQGPIWAKIPHTDGHFHPSPLMGGFGLKNPPPQILIKNTPVPANPPAEFSATKFASFITQYSTGQVSVEIEWELQKENSKRWNPEVQYTSNYAKSANVDFTVDNNGLYTEPRPIGTRYLTRPL

SEQ ID NO: 760 - protein, 736 aa, Artificial Sequence
  Description of Artificial Sequence: Synthetic polypeptide
MAADGYLPDWLEDNLSEGIREWWDLKPGAPKPKANQQKQDDGRGLVLPGYKYLGPFNGLDKGEPVSAADAAALEHDKAYDQQLKAGDNPYLRYNHADAEFQERLQEDTSFGGNLGRAVFQAKKRVLEPLGLVEEGAKTAPGKKRPVEQSPQEPDSSSGIGKTGQQPAKERLNFGQTGDSESVPDPQPLGEPPATPAAVGPTTMASGGGAPMADNNEGADGVGNASGNWHCDSTWLGDRVITTSTRTWALPTYNNHLYKQISSASTGASNDNHYFGYSTPWGYFDFNRFHCHFSPRDWQRLINNNWGFRPKRLNFKLFNIQVKEVTTNDGVTTIANNLTSTVQVFSDSEYQLPYVLGSAHQGCLPPFPADVFMIPQYGYLTLNNGSQAVGRSSFYCLEYFPSQMLRTGNNFTFSYTFEEVPFHSSYAHSQSLDRLMNPLIDQYLYYLNRTQNQSGSAQNKDLLFSRGSPAGMSVQPKNWLPGPCYRQQRVSKTKTDNNNSNFTWTGASKYNLNGRESIINPGTAMASHKDDEDKFFPMSGVMIFGKESAGASNTALDNVMITDEEEIKATNPVATERFGTVAVNFQSSSTDPATGDVHAMGALPGMVWQDRDVYLQGPIWAKIPHTDGHFHPSPLMGGFGLKNPPPQILIKNTPVPANPPAEFSATKFASFITQYSTGQVSVEIEWELQKENSKRWNPEVQYTSNYAKSANVDFTVDNNGLYTEPRPIGTRYLTRPL

SEQ ID NO: 761 - protein, 736 aa, Artificial Sequence
  Description of Artificial Sequence: Synthetic polypeptide
MAADGYLPDWLEDNLSEGIREWWDLKPGAPKPKANQQKQDDGRGLVLPGYKYLGPFNGLDKGEPVNAADAAALEHDKAYDQQLKAGDNPYLRYNHADAEFQERLQEDTSFGGNLGRAVFQAKKRVLEPLGLVEEGAKTAPGKKRPVEQSPQEPDSSSGIGKTGQQPAKKRLNFGQTGDSESVPDPQPLGEPPATPAAVGPTTMASGGGAPMADNNEGADGVGNASGNWHCDSTWLGDRVITTSTRTWALPTYNNHLYKQISSASTGASNDNHYFGYSTPWGYFDFNRFHCHFSPRDWQRLINNNWGFRPKRLNFKLFNIQVKEVTTNDGVTTIANNLTSTVQVFSDSEYQLPYVLGSAHQGCLPPFPADVFMIPQYGYLTLNNGSQAVGRSSFYCLEYFPSQMLRTGNNFTFSYTFEEVPFHSSYAHSQSLDRLMNPLIDQYLYYLNRTQNQSGSAQNKDLLFSRGSPAGMSVQPKNWLPGPCYRQQRVSKTKTDNNNSNFTWTGASKYNLNGRESIINPGTAMASHKDDEDKFFPMSGVMIFGKESAGASNTALDNVMITDEGEIKATNPVATERFGTVAVNFQSSSTDPATGDVHAMGALPGMVWQDRDVYLQGPIWAKIPHTDGHFHPSPLMGGFGLKNPPPQILIKNTPVPANPPAEFSATKFASFITQYSTGQVSVEIEWELQKENSKRWNPEVQYTSNYAKSANVDFTVDNNGLYTEPRPIGTRYLTRPL

SEQ ID NO: 762 - protein, 736 aa, Artificial Sequence
  Description of Artificial Sequence: Synthetic polypeptide
MAADGYLPDWLEDNLSEGIREWWDLKPGAPKPKANQQKQDDGRGLVLPGYKYLGPFNGLDKGEPVNAADAAALEHDKAYDQQLKAGDNPYLRYNHADAEFQERLQEDTSFGGNLGRAVFQAKKRVLEPFGLVEEGAKTAPGKKRPVEQSPQEPDSSSGIGKTGQQPAKKRLNFGQTGDSESVPDPQPLGEPPATPAAVGPTTMASGGGAPMADNNEGADGVGNASGNWHCDSTWLGDRVITTSTRTWALPTYNNHLYKQISSASTGASNDNHYFGYSTPWGYFDFNRFHCHFSPRDWQRLINNNWGFRPKRLNFKLFNIQVKEVTTNDGVTTIANNLTSTVQVFSDSEYQLPYVLGSAHQGCLPPFPADVFMIPQYGYLTLNNGSQAVGRSSFYCPEYFPSQMLRTGNNFTFSYTFEEVPFHSSYAHSQSLDRLMNPLIDQYLYYLNRTQNQSGSAQNKDLLFSRGSPAGMSVQPKNWLPGPCYRQQRVSKTKTDNNNSNFTWTGASKYNLNGRESIINPGTAMASHKDDKDKFFPMSGVMIFGKESAGASNTALDNVMITDEEEIKATNPVATERFGTVAVNFQSSNTDPATGDVHVMGALPGMVWQDRDVYLQGPIWAKIPHTDGHFHPSPLMGGFGLKHPPPQILIKNTPVPANPPAEFSATKFASFITQYSTGQVSVEIEWELQKENSKRWNPEVQYTSNYAKSANVDFTVDNNGLYTEPRPIGTRYLTRPL

SEQ ID NO: 763 - protein, 736 aa, Artificial Sequence
  Description of Artificial Sequence: Synthetic polypeptide
MAADGYLPDWLEDNLSEGIREWWDLKPGAPKPKANQQKQDDGRGLVLPGYKYLGPFNGLDKGEPVNAADAAALEHDKAYDQQLKAGDNPYLRYNHADAEFQERLQEDTSFGGNLGRAVFQAKKRVLEPFGLVEEGAKTAPGKKRPVEQSPQEPDSSSGIGKTGQQPAKKRLNFGQTGDSESVPDPQPLGEPPATPAAVGPTTMASGGGAPMADNNEGADGVGNASGNWHCDSTWLGDRVITTSTRTWALPTYNNHLYKQISSASTGASNDNHYFGYSTPWGYFDFNRFHCHFSPRDWQRLINNNWGFRPKRLNFKLFNIQVKEVTTNDGVTTIANNLTSTVQVFSDSEYQLPYVLGSAHQGCLPPFPADVFMIPQYGYLTLNNGSQAVGRSSFYCLEYFPSQMLRTGNNFTFSYTFEEVPFHSSYAHSQSLDRLMNPLIDQYLYYLNRTQNQSGSAQNKDLLFSRGSPAGMSVQPKNWLPGPCYRQQRVSKTKTDNNNSNFTWTGASKYNLNGRESIINPGTAMASHKDDKDKFFPMSGVMIFGKESAGASNTALDNVMITDEEEIKATNPVATERFGTVAVNFQSSDTDPATGDVHVMGALPGMVWQDRDVYLQGPIWAKIPHTDGHFHPSPLMGGFGLKHPPPQILIKNTPVPANPPAEFSATKFASFITQYSTGQVSVEIEWELQKENSKRWNPEVQYTSNYAKSANVDFTVDNNGLYTEPRPIGTRYLTRPL

SEQ ID NO: 764 - protein, 736 aa, Artificial Sequence
  Description of Artificial Sequence: Synthetic polypeptide
MAADGYLPDWLEDNLSEGIREWWDLKPGAPKPKANQQKQGDGRGLVLPGYKYLGPFNGLDKGEPVNAADAAALEHDKAYDQQLKAGDNPYLRYNHADAEFQERLQEDTSFGGNLGRAVFQAKKRVLEPFGLVEEGAKTAPGKKRPVEQSPQEPDSSSGIGKTGQQPAKKRLNFGQTGDSESVPDPQPLGEPPATPAAVGPTTMASGGGAPMADNNEGADGVGNASGNWHCDSTWLGDRVITTNTRTWALPTYNNHLYKQISSASTGASNDNHYFGYSTPWGYFDFNRFHCHFSPRDWQRLINNNWGFRPKRLNFKLFNIQVKEVTTNDGVTTIANNLTSTVQVFSDSEYQLPYVLGSAHQGCLPPFPADVFMIPQYGYLTLNNGSQAVGRSSFYCLEYFPSQMLRTGNNFTFSYTFEEVPFHSSYGHSQSLDRLMNLLIDQYLYYLNRTQNQSGSAQNKDLLFSRGSPAGMFVQPKNWLPGPCYRQQRVSKTKTDNNNSNFTWTGASKYNLNGRESIINPGTAMASHKDDEDKFFPMSGVMIFGKESAGASNTALDNVMITDEEEIKATNPVATERFGTVAVNFQSSSTDPATGDVHVMGALPGMVWQDRDVYLQGPIWAKIPHTDGHFHPSPLMGGFGLKHPPPQILIKNTPVPANPPAEFSATKFASFITQYSTGQVSVEIEWELQKENSKRWNPEVQYTSNYAKSANVDFTVDNNGLYTEPRPIGTRYLTRPL

SEQ ID NO: 765 - protein, 736 aa, Artificial Sequence
  Description of Artificial Sequence: Synthetic polypeptide
MAADGYLPDWLEDNLSEGIREWWDLKPGAPKPKANQQKQDDGRGLVLPGYKYLGPFNGLDKGEPVNAADAAALEHDKAYDQQLKAGDNPYLRYNHADAEFQERLQEDTSFGGNLGRAVFQAKKRVLEPFGLVEEGAKTAPGKKRPVEQSPQEPDSSSGIGKTGQQPAKKRLNFGQTGDSESVPDPQPLGEPPATPAAVGPTTMASGGGAPMADNNEGADGVGNASGNWHCDSTWLGDRVITTNTRTWALPTYNNHLYKQISSASTGASNDNHYFGYSTPWGYFDFNRFHCHFSPRDWQRLINNNWGFRPKRLNFKLFNIQVKEVTTNDGVTTIANNLTSTVQVFSDSEYQLPYVLGSAHQGCLPPFPADVFMIPQYGYLMLNNGSQAVGRSSFYCLEYFPSQMLRTGNNFTFSYTFEEVPFHSSYAHSQSLDRLMNPLIDQYLYYLNRTQNQSGSAQNKDLLFSRGSPAGMSVQPKNWLPGPCYRQQRVSKTKTDNNNSNFTWTGASKYNLNGRESIINPGTAMASHKDDEDKFFPMSGVMIFGKESAGASNTALDNVMITDEEEIKATNPAATERFGTVAVNFQSSSTDPATGDVHVMGALPGMVWQDRDVYLQGPIWAKIPHTDGHFHPSPLMGGFGLKHPPPQILIKNTPVPANPPAEFSATKFASFITQYSTGQVSVEIEWELQKENSKRWNPEVQYTSNYAKSANVDFTVDNNGLYTEPRPIGTRYLTRPL

SEQ ID NO: 766 - protein, 736 aa, Artificial Sequence
  Description of Artificial Sequence: Synthetic polypeptide
MAADGYLPDWLEDNLSEGIREWWDLKPGAPKPKANQQKQDDGRGLVLPGYKYLGPFNGLDKGEPVNAADAAALEHDKAYDQQLKAGDNPYLRYNHADAEFQERLQEDTSFGGNLGRAVFQAKKRVLEPFGLVEEGAKTAPGKKRPVEQSPQEPDSSSGIGKTGQQPAKKRLNFGQTGDSESVPDPQPLGEPPATPAAVGPTTMASGGGAPMADNNEGADGVGNASGNWHCDSTWLGDRVITTSTRTWALPTYNNHLYKQISSASTGASNDNHYFGYSTPWGYFDFNRFHCHFSPRDWQRLINNNWGFRPKRLNFKLFNIQVKEVTTNDGVTTIANNLTSTVQVFSDSEYQLPYVLGSAHQGCLPPFPADVFMIPQYGYLTLNNGSQAVGRSSFYCLEYFPSQMLRTGNNFTFSYTFEEVPFHSSYAHSQSLDRLMNPLIDQYLYYLNRTQNQSGSAQNKDLLFSRGSPAGMSVQPKNWLPGPCYRQQRVSKTKTDNNNSNFTWTGASKYNLNGRESIINPGTAMASHKDDEDKFFPMSGVMIFGKESAGASNTALDNVMITDEEEIKATNPVATERFGTVAVNFQSSSTDPATGDVHVMGALPGMVWQDRDVYLQGPIWAKIPHTDGHFHPSPLMGGFGLKHPPPQILIKNTPVPANPPAEFSATKFASFITQYSTGQVSVEIEWELQKENSKRWNPEVQYTSNYAKSANVDFTVDNNGLYTEPRPIGTRYLTRPL

SEQ ID NO: 767 - protein, 736 aa, Artificial Sequence
  Description of Artificial Sequence: Synthetic polypeptide
  MOD_RES (102)..(102): Any naturally occurring amino acid
MAADGYLPDWLEDNLSEGIREWWDLKPGAPKPKANQQKQDDGRGLVLPGYKYLGPFNGLDKGEPVNAADAAALEHDKAYDQQLKAGDNPYLRYNHADAEFQXRLQEDTSFGGNLGRAVFQAKKRVLEPFGLVEEGAKTAPGKKRPVEQSPQEPDSSSGIGKTGQQPAKKRLNFGQTGDSESVPDPQPLGEPPATPAAVGPTTMASGGGAPMADNNEGADGVGNASGNWHCDSTWLGGRVITTSTRTWALPTYNNHLYKQISSASTGASNDNHYFGHSTPWGYFDFNRFHCHFSPRDWQRLINNNWGFRPKRLNFKLFNIQVKEVTTNDGVTTIANNLTSTVQVFSDSEYQLPYVLGSAHQGCLPPSPADVFMIPQYGYLTLNNGSQAVGRSSFYCLEYFPSQMLRTGNNFTFSYTFEEVPFHSSYAHSQSLDRLMNPLIDQYLYYLNRTQNQSGSAQNKDLLFSRGSPAGMSVQPKNWLPGPCYRQQRVSKTKTDNNNSNFTWTGASKYNLNGRESIINPGTAMASHKDDKDKFFPMSGVMIFGKESAGASNTALDNVMITDEEEIKATNPVATERFGTVAVNFQSSNTDPATGDVHVMGALPGMVWQDRDVYLQGPIWAKIPHTDGHFHPSPLMGGFGLKHPPPQILIKNTPVPANPPAEFSATKFASFITQYSTGQVSVEIEWELQKENSKRWNPEVQYTSNYAKSANVDFTVDNNGLYTEPRPIGTRYLTRPL

SEQ ID NO: 768 - protein, 736 aa, Artificial Sequence
  Description of Artificial Sequence: Synthetic polypeptide
MAADGYFPDWLEDNLSEGIREWWDLKPGAPKPKANQQKQDDGRGLVLPGYKYLGPFNGLDKGEPVNAADAAALEHDKAYDQQLKAGDNPYLRYNHADAEFQERLQEDTSFGGNLGRAVFQAKKRVLEPFGLVEEGAKTAPGKKRPVEQSPQEPDSSSGIGRTGQQPAKKRLNFGQTGDSESVPDPQPLGEPPATPAAVGPTTMASGGGAPMADNNEGADGVGNASGNWHCDSTWLGDRVITTSTRTWALPTYNNHLYKQISSASTGASNDNHYFGYSTPWGYFDFNRFHCHFSPRDWQRLINNNWGFRPKRLNFKLFNIQVKEVTTNDGVTTIANNLTSTVQVFSDSEYQLPYVLGSAHQGCLPPFPADVFMIPQYGYLTLNNGSQAVGRSSFYCLEYFPSQMLRTGNNFTFSYTFEEVPFHSSYAHSQSLDRLMNPLIDQYLYYLNRTQNQSGSAQNKDLLFSRGSPAGMSVQPKNWLPGPCYRQQRVSKTKTDNNNSNFTWTGASKYNLNGRESIINPGTAMASHKDDEDKFFPMSGVMIFGKESAGASNTALDNVMITDEEEIKATNPVATERFGTVAVNFQSSSPDPATGDVHVMGALPGMVWQDRDVYLQGPIWAKIPHTDGHFHPSPLMGGFGLKHPPPQILIKNTPVPANPPAEFSATKFASFITQYSTGQVSVEIEWELQKENSKRWNPEVQYTSNYAKSANVDFTVDNNGLYSEPRPIGTRYLTRPL

SEQ ID NO: 769 - protein, 736 aa, Artificial Sequence
  Description of Artificial Sequence: Synthetic polypeptide
MAADGYLPDWLEDNLSEGIREWWDLKPGAPKPKANQQKQDDGRGLVLPGYKYLGPFNGLDKGEPVNAADAAALEHDKAYDQQLKAGDNPYLRYNHADAEFQERLQEDTSFGGNLGRAVFQAKKRVLEPFGLVEEGAKTAPGKKRPVEQSPQEPDSSSGIGKTGQQPAKKRLNFGQTGDSESVPDPQPLGEPPATPAAVGPTTMASGGGAPMADNNEGADGVGNASGNWHCDSTWLGDRVITTSTRTWALPTYNNHLYKQTSSASTGASNDNHYFGYSTPWGYFDFNRFHCHFSPRDWQRLINNNWGFRPKRLNFKLFNIQVKEVTTNDGVTTIANNLTSTVQVFSDSEYQLPYVLGSAHQGCLPPFPADVFMIPQYGYLTLNNGSQAVGRSSFYCLEYFPSQMLRTGNNFTFSYTFEEVPFHSSYAHSQSLDRLMNPLIDQYLYYLNRTQNQSGSAQNKDLLFSRGSPAGMSVQPKNWLPGPCYRQQRVSKTKTDYNNSNFTWTGASKYNLNGRESIINPGTAMASHKDDEDKFFPMSGVMIFGKESAGASNTALDNVMITDEEEIKATNPVATERFGTVAVNFQSSSTDPATGDVHVMGALPGMVWQDRDVYLQGPIWAKIPHTDGHFHPSPLMGGFGLKHPPPQILIKNTPVPANPPAEFSATKFASFITQYSTGQVSVEIEWELQKENSKRWNPEVQYTSNYAKSANVDFTVDNNGLYTEPRPIGTRYLTRPL

SEQ ID NO: 770 - protein, 736 aa, Artificial Sequence
  Description of Artificial Sequence: Synthetic polypeptide
MAADGYPPDWLEDNLSEGIREWWDLKPGVPKPKANQQKQDDGRGLVLPGYKYLGPFNGLDKGEPVNAADAAALEHDKAYDQQLKAGDNPYLRYNHADAEFQERLQEDTSFGGNLGRAVFQAKKRVLEPFGLVEEGAKTAPGKKRPVEQSPQEPDSSSGIGKTGQQPAKKRLNFGQTGDSESVPDPQPLGEPPATPAAVGPTTMASGGGAPMADNNEGADGVGNASGNWHCDSTWLGDRVITTSTRTWALPTYNNHLYKQISSASTGASNDNHYFGYSTPWGYFDFNRFHCHFSPRDWQRLINNNWGFRPKRLNFKLFNIQVKEVTTNDGVTTIANNLTSTVQVFSDSEYQLPYVLGSAHQGCLPPFPADVFMIPQYGYLTLNNGSQAVGRSSFYCLEYFPSQMLRTGNNFTFSYTFEEVPFHSSYAHSQSLDRLMNPLIDQYLYYLNRTQNQSGSAQNKDLLFSRGSPAGMSVQPKNWLPGPCYRQQRVSKTKTDNNNSNFTWTGASKYNLNGRESIINPGTAMASHKDDEDKFFPMSGVMIFGKESAGASNTALDNVMITDEEEIKATNPVATERFGTVAVNFQSSSTDPATGDVHVMGALPGMVWQDRDVYLQGPIWAKIPHTDGHFHPSPLMGGFGLKHPPPQILIKNTPVPANPPAEFSATKFASFITQYSTGQVSVEIEWELQKENSKRWNPEVQYTSNYAKSANVDFTVDNNGLYTEPRPIGTRYLTRPL

SEQ ID NO: 771 - protein, 732 aa, Artificial Sequence
  Description of Artificial Sequence: Synthetic polypeptide
MAADGYLPDWLEDNLSEGIREWWDLKPGAPKPKANQQKQDDGRGLVLPGYKYLGPFNGLDKGEPVNAADAAALEHDKAYDQQLKAGDNPYLRYNHADAEFQERLQEDTSFGGNLGRAVFQAKKRVLEPFGLVEEGAKTAPGKKRPVEQSPQEPDSSSGIGKTGQQPAKKRLNFGQTGDSESVPDPQPLGEPPATPAAVGPTTMASGGGAPMADNNEGADGVGNASGNWHCDSTWLGDRVITTSTRTWALPTYNNHLYKQISSASTGASNDNHYFGYSTPWGYFDFNRFHCHFSPRDWQRLINNNWGFRPKRLNFKLFNIQVKEVTTNDGVTTIANNLTSTVQAFSDSEYQLPYVLGSAHQGCLPPFPADVFMIPQYGYLTLNNGSQAVGRSSFYCLEYFPSQMLRTGNNFTFSYTFEEVPFHSSYAHSQSLDRLMNPLIDPYLYYLNRTQNQSGSAQNKDLLFSRGSPAGMSVQPKNWLPGPCYRQQRVSKTKTDNNNSNFTWTGASKYNLNGRESIINPGTAMASHKDDEDKFFPMSGVMIFGKESAGASNTALDNVMITDEEEIKATNPVATERFGTVAVNFQSSSTDPATGDVHVMGALPGMVWQDRDVYLQGPIWAKIPHTDGHFHPSPLMGGFGLKHPPPQILIKNTPVPANPPAEFSATKFASFITQYSTGQVSVEIEWELQKENSKRWNPEVQYTSNYAKSANVDFTVDNNGLYTEPRPIGTRYL

SEQ ID NO: 772 - protein, 736 aa, Artificial Sequence
  Description of Artificial Sequence: Synthetic polypeptide
MAADGYLPDWLEDNLSEGIREWWDLKPGAPKPKANQQKQDDGRGLVLPGYKYLGPFNGLDKGEPVNAADAAALEHDKAYDQQLKAGDNPYLRYNHADAEFQERLQEDTSFGGNLGRAVFQAKKRVLEPFGLVEEGAKTAPGKKRPVEQSPQEPDSSSGIGKTGQQPAKKRLNFGQTGDSESVPDPQPLGEPPATPAAVGPTTMASGGGAPMADNNEGADGVGNASGNWHCDSTWLGDRVITTSTRTWALPTYNNHLYKQISSASTGASNDNHYFGYSTPWGYFDFNRFHCHFSPRDWQRLINNNWGFRPKRLNFKLFNIQVKEVTTNDGVTTIANNLTSTVQVFSDSEYQLPYVLGSAHQGCLPPFPADVFMIPQYGYLTLNNGSQAVGRSSFYCLEYFPSQMLRTGNNFTFSYTFEEVPFHSSYAHSQSLDRLMNPLIDQYLYYLNRTQNQSGSAQNKDLLFSRGSPAGMSVQPKNWLPGPCYRQQRVSKTKTDNNNSNFTWTGASKYNLNGRESIINPGTAMASHKDDEDKFFPMSGVMIFGKESAGASNTALDNVMITDEEEIKATNPVATERFGTVAVNFQSSSTDPATGDVHVMGALPGMVWQDRDVYLQGPIWAKIPHTDGHSHPSPLMGGFGLKHPPPQILIKNTPVPANPPAEFSATKFASFITQYSTGQVSVEIEWELQKENSKRWNPEVQYTSNYAKSANVDFTVDNNGLYTEPRPIGTRYLTRPL

SEQ ID NO: 773 - protein, 736 aa, Artificial Sequence
  Description of Artificial Sequence: Synthetic polypeptide
MAADGYLPDWLEDNLSEGIREWWDLKPGAPKPKANQQKQDDGRGLVLPGYKYLGPFNGLDKGEPVNAADAAALEHDKAYDQQLKAGDNPYLRYNHADAEFQERLQEDTSFGGNLGRAVFQAKKRVLEPFGLVEEGAKTAPGKKRPVEQSPQEPDSSSGIGKTGQQPAKKRLNFGQTGDSESVPDPQPLGEPPATPAAVGPTTMASGGGAPMADNNEGADGVGNASGNWHCDSTWLGDRVITTSTRTWALPTYNNHLYKQISSASTGASNDNHYFGYSTPWGYFDFNRFHCHFSPRDWQRLINNNWGFRPKRLNFKLFNIQVKEVTTNDGVTTIANNLTSTVQVFSDSEYQLPYVLGSAHQGCLPPFPADVFMIPQYGYLTLNNGSQAVGRSSFYCLEYFPSQMLRTGNNFTFSYTFEEVPFHSSYAHSQSLDRLMNPLIDLYLYYLNRTQNQSGSAQNKDLLFSRGSPAGMSVQPKNWLPGPCYRQQRVSKTKTDNNNSNFTWTGASKYNLNGRESIINPGTAMASHKDDEDKFFPMSGVMIFGKESAGTSNTALDNVMITDEEEIKATNPVATERFGTVAVNFQSSSTDPATGDVHVMGALPGMVWQDRDVYLQGPIWAKIPHTDGHFHPSPLMGGFGLKHPPPQILIKNTPVPANPPAEFSATKFASFITQYSTGQVSVEIEWELQKENSKRWNPEVQYTSNYAKSANVDFTVDNNGLYTEPRPIGTRYLTRPL

SEQ ID NO: 774 - protein, 736 aa, Artificial Sequence
  Description of Artificial Sequence: Synthetic polypeptide
MAADGYLPDWLEDSLSEGIREWWDLKPGAPKPKANQQKQDDGRGLVLPGYKYLGPFNGLDKGEPVNAADAAALEHDKAYDQQLKAGDNPYLRYNHADAEFQERLQEDTSFGGNLGRAVFQAKKRVLEPFGLVEEGAKTAPGKKRPVEQSPQEPDSSSGIGKTGQQPAKKRLNFGQTGDSESVPDPQPLGEPPATPAAVGPTTMASGGGAPMADNNEGADGVGNASGNWHCDSTWLGDRVITTSTRTWALPTYNNHLYKQISSASTGASNDNHYFGYSTPWGYFDFNRFHCHFSPRDWQRLINNNWGFRPKRLNFKLFNIQVKEVTTNDGVTTIANNLTSTVQVFSDSEYQLPYVLGSAHQGCLPPFPADVFMIPQYGYLTPNNGSQAVGRSSFYCLEYFPSQMLRTGNNFTFSYTFEEVPFHSSYAHSQSLDRLMNPLIDQYQYYLNRTQNQSGSAQNKDLLFSRGSPAGMSVQPKNWLPGPCYRQQRVSKTKTDNNNSNFTWTGASKYNLNGRESIINPGTAMASHKDDEDKFFPMSGVMIFGKESAGASNTALDNVMITDEEEIKATNPVATERFGTVAVNFQSSSTDPATGDVHVMGALPGMVWQDRDVYLQGPIWAKIPHTDGHFHPSPLMGGFGLKHPPPQILIKNTPVPANPPAEFSATKFASFITQYSTGQVSVEIEWELQKENSKRWNPEVQYTSNYAKSANVDFTVDNNGLYTEPRPIGTRYLTRPL

SEQ ID NO: 775 - protein, 736 aa, Artificial Sequence; identical to SEQ ID NO: 766
  Description of Artificial Sequence: Synthetic polypeptide

SEQ ID NO: 776 - protein, 735 aa, Artificial Sequence
  Description of Artificial Sequence: Synthetic polypeptide
MAADGYLPDWLEDTLSEGIRQWWKLKPGPPPPKPAERHKDDSRGLVLPGYKYLGPFNGLDKGEPVNEADAAALEHDKAYDRQLDSGDNPYLKYNHADAEFQERLKEDTSFGGNLGRAVFQAKKRVLEPLGLVEEPVKTAPGKKRPVEHSPVEPDSSSGTGKAGQQPARKRLNFGQTGDADSVPDPQPLGQPPAAPSGLGTNTMATGSGAPMADNNEGADGVGNSSGNWHCDSTWMGDRVITTSTRTWALPTYNNHLYKQISSQSGASNDNHYFGYSTPWGYFDFNRFHCHFSPRDWQRLINNNWGFRPKRLNFKLFNIQVKEVTQNDGTTTIANNLTSTVQVFTDSEYQLPYVLGSAHQGCLPPFPADVFMVPQYGYLTLNNGSQAVGRSSFYCLEYFPSQMLRTGNNFTFSYTFEDVPFHSSYAHSQSLDRLMNPLIDQYLYYLSRTNTPSGTTTQSRLQFSRAGASDIRDQSRNWLPGPCYRQQRVSKTSADNNNSEYSWTGATKYHLNGRDSLVNPGPAMASHKDDEEKFFPQSGVLIFGKQGSEKTNVDIEKVMITDEEEIRTTNPVATEQYGSVSTNLQRGNRQAATADVNTQGVLPGMVWQDRDVYLQGPIWAKIPHTDGHFHPSPLMGGFGLKHPPPQILIKNTPVPANPSTTFSAAKFASFITQYSTGQVSVEIEWELQKENSKRWNPEIQYTSNYNKSVNVDFTVDTNGVYSEPRPIGTRYLTRNL

SEQ ID NO: 777 - DNA, 2211 bp, Artificial Sequence
  Description of Artificial Sequence: Synthetic polynucleotide
atggctgctgacggttatcttccagattggctcgaggacaacctttctgaaggcattcgtgagtggtgggctctgaaacctggagtccctcaacccaaagcgaaccaacaacaccaggacaaccgtcggggtcttgtgcttccgggttacaaatacctcggacccggtaacggactcgacaaaggagagccggtcaacgaggcggacgcggcagccctcgaacacgacaaagcttacgaccagcagctcaaggccggtgacaacccgtacctcaagtacaaccacgccgacgccgagtttcaggagcgtcttcaagaagatacgtcttttgggggcaaccttggcagagcagtcttccaggccaaaaagaggatccttgagcctcttggtctggttgaggaagcagctaaaacggctcctggaaagaagaggcctgtagatcagtctcctcaggaaccggactcatcatctggtgttggcaaatcgggcaaacagcctgccagaaaaagactaaatttcggtcagactggcgactcagagtcagtcccagaccctcaacctctcggagaaccaccagcagcccccacaagtttgggatctaatacaatggcttcaggcggtggcgcaccaatggcagacaataacgagggtgccgatggagtgggtaattcctcaggaaattggcattgcgattcccaatggctgggcgacagagtcatcaccaccagcaccagaacctgggccctgcccacttacaacaaccatctctacaagcaaatctccagccaatcaggagcttcaaacgacaaccactactttggctacagcaccccttgggggtattttgactttaacagattccactgccacttctcaccacgtgactggcagcgactcattaacaacaactggggattccggcccaagaaactcagcttcaagctcttcaacatccaagttaaagaggtcacgcagaacgatggcacgacgactattgccaataaccttaccagcacggttcaagtgtttacggactcggagtatcagctcccgtacgtgctcgggtcggcgcaccaaggctgcctcccgccgtttccagcggacgtcttcatggtccctcagtatggatacctcaccctgaacaacggaagtcaagcggtgggacgctcatccttttactgcccggagtacttcccttcgcagatgctaaggactggaaataacttccaattcagctataccttcgaggatgtaccttttcacagcagctacgctcacagccagagtttggatcgcttgatgaatcctcttattgatcagtatctgtactacctgaacagaacgcaaggaacaacctctggaacaaccaaccaatcacggctgctttttagccaggctgggcctcagtctatgtctttgcaggccagaaattggctacctgggccctgctaccggcaacagagactttcaaagactgctaacgacaacaacaacagtaactttccttggacagcggccagcaaatatcatctcaatggccgcgactcgctggtgaatccaggaccagctatggccagtcacaaggacgatgaagaaaaatttttccctatgcacggcaatctaatatttggcaaagaagggacaacggcaagtaacgcagaattagataatgtaatgattacggatgaagaagagattcgtaccaccaatcctgtggcaacagagcagtatggaactgtggcaaataacttgcagagctcaaatacagctcccacgactagaactgtcaatgatcagggggccttacctggcatggtgtggcaagatcgtgacgtgtaccttcaaggacctatctgggcaaagattcctcacacggatggacactttcatccttctcctctgatgggaggctttggactgaaacatccgcctcctcaaatcatgatcaaaaatactccggtaccggcaaatcctccgacgactttcagcccggccaagtttgcttcatttatcactcagtactccactggacaggtcagcgtggaaattgagtgggagctacagaaagaaaacagcaaacgttggaatccagagattcagtacacttccaactacaacaagtctgttaatgtggactttactgtagacactaatggtgtttatagtgaacctcaccctattggaacccggtatctcacacgaaacttgtaa

SEQ ID NO: 778 - DNA, 2211 bp, Artificial Sequence
  Description of Artificial Sequence: Synthetic polynucleotide
atggctgctgatggttatcttccagattggctcgaggacaacctttctgaaggcattcgtgagtggtgggctctgaaacctggagtccctcaacccaaagcgaaccaacaacaccaggacaaccgtcggggtcttgtgcttccgggttacaaatacctcggacccggtaacggactcgacaaaggagagccggtcaacgaggcggacgcggcagccctcgaacacgacaaagcttacgaccagcagctcaaggccggtgacaacccgtacctcaagtacaaccacgccgacgccgagtttcaggagcgtcttcaagaagatacgtcttttgggggcaaccttggcagagcagtcttccaggccaaaaagaggatccttgagcctcttggtctggttgaggaagcagctaaaacggctcctggaaagaagaggcctgtagatcagtctcctcaggaaccggactcatcatctggtgttggcaaatcgggcaaacagcctgccagaaaaagactaaatttcggtcagactggcgactcagagtcagtcccagaccctcaacctctcggagaaccaccagcagcccccacaagtttgggatctaatacaatggcttcaggcggtggcgcaccaatggcagacaataacgagggtgccgatggagtgggtaattcctcaggaaattggcattgcgattcccaatggctgggcgacagagtcatcaccaccagcaccagaacctgggccctgcccacttacaacaaccatctctacaagcaaatctccagccaatcaggagcttcaaacgacaaccactactttggctacagcaccccttgggggtattttgactttaacagattccactgccacttctcaccacgtgactggcagcgactcattaacaacaactggggattccggcccaagaaactcagcttcaagctcttcaacatccaagttaaagaggtcacgcagaacgatggcacgacgactgttgccaataaccttaccagcacggttcaagtgtttacggactcggagtatcaactcccgtacgtgctcgggtcggcgcaccaaggctgtctcccgccgtttccagcggacgtcttcatggtccctcagtatggatacctcaccctgaacaacggaagtcaagcggtgggacgctcatccttttactgcctggagtacttcccttcgcagatgctaaggactggaaataacttccaattcagctataccttcgaggatgtaccttttcacagcagctacgctcacagccagagtttggatcgcttgatgaatcctcttattgatcagtatctgtactacctgaacagaacgcaaggaacaacctctggaacaaccaaccaatcacggctgctttttagccaggctgggcctcagtctatgtctttgcaggccagaaattggctacctgggccctgctaccggcaacagagactttcaaagactgctaacgacaacaacaacagtaactttccttggacagcggccagcaaatatcatctcaatggccgcgactcgctggtgaatccaggaccagctatggccagtcacaaggacgatgaagaaaaatttttccctatgcacggcaatctaatatttggcaaagaagggacaacggcaagtaacgcagaattagataatgtaatgattacggatgaagaagagattcgtaccaccaatcctgtggcaacagagcagtatggaactgtggcaaataacttgcagagctcaaatacagctcccacgactagaactgtcaatgatcagggggccttacctggcatggtgtggcaagatcgtgacgtgtaccttcaaggacctatctgggcaaagattcctcacacggatggacactttcatccttctcctctgatgggaggctttggactgaaacatccgcctcctcaaatcatgatcaaaaatactccggtaccggcaaatcctccgacgactttcagcccggccaagtttgcttcatttatcactcagtactccactggacaggtcagcgtggaaattgagtgggagctacagaaagaaaacagcaaacgttggaatccagagattcagtacacttccaactacaacaagtctgttaatgtggactttactgtagacactaatggtgtttatagtgaacctcgccctattggaacccggtatctcacacgaaacttgtaa

SEQ ID NO: 779 - DNA, 2211 bp, Artificial Sequence
  Description of Artificial Sequence: Synthetic polynucleotide
atggctgctgacggttatcttccagattggctcgaggacaacctttctgaaggcattcgtgagtggtgggctctgaaacctggagtccctcaacccaaagcgaaccaacaacaccaggacaaccgtcggggtcttgtgcttccgggttacaaatacctcggacccggtaacggactcgacaaaggagagccggtcaacgaggcggacgcggcagccctcgaacacgacaaagcttacgaccagcagctcaaggccggtgacaacccgtacctcaagtacaaccacgccgacgccgagtttcaggagcgtcttcaagaagatacgtcttttgggggcaaccttggcagagcagtcttccaggccaaaaagaggatccttgagcctcttggtctggttgaggaagcagctaaaacggctcctggaaagaagaggcctgtagatcagtctcctcaggaaccggactcatcatctggtgttggcaaatcgggcaaacagcctgccagaaaaagactaaatttcggtcagactggcgactcagagtcagtcccagaccctcaacctctcggagaaccaccagcagcccccacaagtttgggatctaatacaatggcttcaggcggtggcgcaccaatggcagacaataacgagggtgccgatggagtgggtaattcctcaggaaattggcattgcgattcccaatggctgggcgacagagtcatcaccaccagcaccagaacctgggccctgcccacttacaacaaccatctctacaagcaaatctccggccaatcaggagcttcaaacgacaaccactactttggctacagcaccccttgggggtattttgactttaacagattccactgccacttctcaccacgtgactggcagcgactcattaacaacaactggggattccggcccaagaaactcagcttcaagctcttcaacatccaagttaaagaggtcacgcagaacgatggcacgacgactattgccaataaccttaccagcacggttcaagtgtttacggactcggagtatcagctcccgtacgtgctcgggtcggcgcaccaaggctgtctcccgccgtttccagcggacgtcttcatggtccctcagtatggatacctcaccctgaacaacggaagtcaagcggtgggacgctcatccttttactgcctggagtacttcccttcgcagatgctaaggactggaaataacttccaattcagctataccttcgaggatgtaccttttcacagcagctacgctcacagccagagtttggatcgcttgatgaatcctcttattgatcagtatctgtactacctgaacagaacgcaaggaacaacctctggaacaaccaaccaatcacggctgctttttagccaggctgggcctcagtctatgtctttgcaggccagaaattggctacctgggccctgctaccggcaacagagactttcaaagactgctaacggcaacaacaacagtaactttccttggacagcggccagcaaatatcatctcaatggccgcgactcgctggtgaatccaggaccagctatggccagtcacaaggacgatgaagaaaaatttttccctatgcacggcaatctaatatttggcaaagaagggacaacggcaagtaacgcagaattagataatgtaatgattacggatgaagaagagattcgtaccaccaatcctgtggcaacagagcagtgtggaactgtggcaaataacttgcagagctcaaatacagctcccacgactagaactgtcaatgatcagggggccttacctggcatggtgtggcaagatcgtgacgtgtaccttcaaggacctatctgggcaaagattcctcacacggatggacactttcatccttctcctctgatgggaggctttggactgaaacatccgcctcctcaaatcatgatcaaaaatactccggtaccggcaaatcctccgacgactttcagcccggccaagtttgcttcatttatcactcagtactccactggacaggtcagcgtggaaattgagtgggagctacagaaagaaaacagcaaacgttggaatccagagattcagtacacttccaactacaacaagtctgttaatgtggactttactgtagacactaatggtgtttatagtgaacctcgccctattggaacccggtatctcacacgaaacttgtaa

SEQ ID NO: 780 - DNA, 2212 bp, Artificial Sequence
  Description of Artificial Sequence: Synthetic polynucleotide
  modified_base (1283)..(1283): a, c, g, or t
atggctgctgacggttatcttccagattggctcgaggacaacctttctgaaggcattcgtgagtggtgggctctgaaacctggagtccctcaacccaaagcgaaccaacaacaccaggacaaccgtcggggtcttgtgcttccgggttacaaatacctcggaccgggtaacggactcgacaaaggagagccggtcaacgaggcggacgcggcagccctcgaacacgacaaagcttacgaccagcagctcaaggccggtgacaacccgtacctcaagtacaaccacgccgacgccgagtttcaggagcgtcttcaagaagatacgtcttttgggggcaaccttggcagagcagtcttccaggccaaaaagaggatccttgagcctcttggtctggttgagggagcagctaaaacggctcctggaaagaagaggcctgtagatcagtctcctcaggaaccggactcatcatctggtgttggcaaatcgggcaaacagcctgccagaaaaagactaaatttcggtcagactggcgactcagagtcagtcccagaccctcaacctctcggagaaccaccagcagcccccacaagtttgggatctaatacaatggcttcaggcggtggcgcaccaatggcagacaataacgagggtgccgatggagtgggtaattcctcaggaaattggcattgcgattcccaatggctgggcgacagagtcatcaccaccagcaccagaacctgggccctgcccacttacaacagccatctctacaagcaaatctccagccaatcaggagcttcaaacgacaaccactactttggctacagcaccccttgggggtattttgactttaacagattccactgccacttctcaccacgtgactggcagcgactcattaacaacaactggggattccggcccaagaaactcagcttcaagctcttcaacatccaagttaaagaggtcacgcagaacgatggcacgacgactattgccaataaccttaccagcacggtccaagtgtttacggactcggagtatcagctcccgtacgtgctcgggtcggcgcaccaaggctgtctcccgccgtttccagcggacgccttcatggtccctcagtatggatacctcaccctgaacaacggaagtcaagcggtgggacgctcatccttttactgcctggagtacttcccttcgcagatgctaaggactggaaataacttccaattcagctataccttcgaggatgtaccttttcacggcagctacgctcacagccngagtttggatcgcttgatgaatcctcttattgatcagtatctgtactacctgaacagaacgcaaggaacaacctctggaacaaccaaccaatcacggctgctttttagccaggctgggcctcagtctatgtctttgcaggccagaaattggctacctgggccctgctaccggcaacagagacttttcaaagactgctaacgacaacaacaacagtaactttccttggacagcggccagcaaatatcatctcaatggccgcgactcgctggtgaatccaggaccagctatggccagtcacaaggacgatgaagaaaaatttttccctatgcacggcaatctaatatttggcaaagaagggacaacggcaagtaacgcagaattagataatgtaatgattacggatgaagaagagattcgtaccaccaatcctgtggcaacagagcagtatggaactgtggcaaataacttgcagagctcaaatacagctcccacgactagaactgtcaatgatcagggggccttacctggcatggtgtggcaagatcgtgacgtgtaccttcaaggacctatctgggcaaagattcctcacacggatggacactttcatccttctcctctgatgggaggctttggactgaaacatccgcctcctcaaatcatgatcaaaaatactccggtaccggcaaatcctccgacgactttcagcccggccaagtttgcttcatttatcactcagtactccactggacaggtcagcgtggaaattgagtgggagctacagaaagaaaacagcaaacgttggaatccagagattcagtacacttccaactacaacaagtctgttaatgtggactttactgtagacactaatggtgtttatagtgaacctcgccctattggaacccggtatctcacacgaaactcgtaa

SEQ ID NO: 781 - DNA, 2212 bp, Artificial Sequence
  Description of Artificial Sequence: Synthetic polynucleotide
atggctgctgacggttatcttccagattggctcgaggacaacctttctgaaggcattcgtgagtggtgggctctgaaacctggagtccctcaacccaaagcgaaccaacaacaccaggacaaccgtcggggtcttgtgcttccgggttacaaatacctcggacccggtaacggactcgacaaaggagagccggtcaacgaggcggacgcggcagccctcgaacacgacaaagcttacgaccagcagctcaaggccggtgacaacccgtacctcaagtacaaccacgccgacgccgagtttcaggagcgtcttcaagaagatacgtcttttgggggcaaccttggcagagcagtcttccaggccaaaaagaggatccttgagcctcttggtctggttgagggagcagctaaaacggctcctggaaagaagaggcctgtagatcagtctcctcaggaaccggactcatcatctggtgttggcaaatcgggcaaacagcttgccagaaaaagactaaatttcggtcagactggcgactcagagtcagtcccagaccctcaacctctcggagaaccaccagcagcccccacaagtttgggatctaatacaatggcttcaggcggtggcgcaccaatggcagacaataacgagggtgccgatggagtgggtaattcctcaggaaattggcattgcgattcccaatggctgggcgacagagtcatcaccaccagcaccagaacctgggccctgcccacttacaacagccatctctacaagcaaatctccggccaatcaggagcttcaaacgacaaccactactttggctacagcaccccctgggggtattttgactttaacagattccactgccacttctcaccacgtgactggcagcgactcattaacaacaactggggattccggcccaagaaactcagcttcaagctcttcaacatccaagttaaagaggtcacgcagaacgatggcacgacgactattgccaataaccttaccagcacggttcaagtgtttacggactcggagtatcagctcccgtacgtgctcgggtcggcgcaccaaggctgtctcccgccgtttccagcggacgtcttcatggtccctcagtatggatacctcaccctgaacaacggaagtcaagcggtgggacgctcatccttttactgcctggagtacttcccttcgcagatgctaaggactggaaataacttccaattcagctataccttcgaggatgtaccttttcacagcagctacgctcacagccagagtttggatcgcttgatgaatcctcttattgatcagtatctgtactacctgaacagaacgcaaggaacaacctctggaacaaccaaccaatcacggctgctttttagccaggctgggcctcagtctatgtctttgcaggccagaaattggctacctgggccctgctaccggcaacagagactttcaaagactgctaacgacaacaacaacagtaactttccttggacagcggccagcaaatatcatctcaatggccgcgactcgctggtgaatcccaggaccagctatggccagtcacaaggacgatgaagaaaaatttttccctatgcacggcaatctaatatttggcaaagaagggacaacggcaagtaacgcagaattagataatgtaatgattacggatgaagaagagattcgtaccaccaatcctgtggcaacagagcagtatggaactgtggcaaataacttgcagagctcaaatacagctcccacgactagaactgtcaatgatcagggggccttacctggcatggtgtggcaagatcgtgacgtgtaccttcaaggacctatctgggcaaagattcctcacacggatggacactttcatccttctcctctgatgggaggctttggactgaaacatccgcctcctcaaatcatgatcaaaaatactccggtaccggcaaatcctccgacgactttcagcccggccaagtttgcttcatttatcactcagtactccactggacaggtcagcgtggaaattgagtgggagctacagaaagaaaacagcaaacgttggaatccagagattcagtacacttccaactacaacaagtctgttaatgtggactttactgtagacactaatggtgtttatagtgaacctcgccctattggaacccggtatctcacacgaaacttgtaa

SEQ ID NO: 782 - DNA, 2212 bp, Artificial Sequence
  Description of Artificial Sequence: Synthetic polynucleotide
atggctgctgacggttatcttccagattggctcgaggacaacctttctgaaggcattcgtgagtggtgggctctgaaacctggagtccctcaacccaaagcgaaccaacaacaccaggacgaccgtcggggtcttgtgcttccgggttacaaatacctcggacccggtaacggactcgacaaaggagagccggtcaacgaggcggacgcggcagccctcgaacacgacaaagcttacgaccagcagctcaaggccggtgacaacccgtgcctcaagtacaaccacgccgacgccgagtttcaggagcgtcttcaagaagatacgtcttttgggggcaaccttggcagagcagtcttccaggccaaaaagaggatccttgagcctcttggtctggttgaggaagcagctaaaacggctcctggaaagaagaggcctgtagatcagtctcctcaggaaccggactcatcatctggtgttggcaaatcgggcaaacagcctgccagaaaaagactaaatttcggtcagactggcgactcagagtcagtcccagaccctcaacctctcggagaaccaccagcagcccccacaagtttgggatctaatacaatggcttcaggcggtagcgcaccaatggcagacaataacgagggtgccgatggagtgggtaattcctcaggaaattggcattgcgattcccaatggctgggcgacagagtcatcaccaccagcaccagaacctgggccctgcccacttacaacaaccatctctacaagcaaatctccagccaatcaggagcttcaaacgacaaccactactttggctacagcaccccttgggggtattttgactttaacagattccactgccacttctcaccacgtgactggcagcgactcattaacaacaactggggattccggcccaagaaactcagcttcaagctcttcaacatccaagttaaagaggtcacgcagaacgatggcacgacgactattgccaataaccttaccagcacggttcaagtgtttacggactcggagtatcagctcccgtacgtgctcgggtcggcgcaccaaggctgtctcccgccgtttccagcggacgtcttcatggtccctcagtatggatacctcaccctgaacaacggaagtcaagcggtgggacgctcatccttttactgcctggagtacttcccttcgcagatgctaaggactggaaataacttccaattcagctataccttcgaggatgtaccttttcacagcagctacgctcacagccagagtttggatcgcttgatggatcctcttattgatcagtatctgtactacctgaacagaacgcaaggaacaacctctggaacaaccaaccaatcacggctgctttttagccaggctgggcctcagtctatgtctttgcaggccagaaattggctacctgggccctgctaccggcaacagagactttcaaagactgctaacgacaacaacaacagtaactttccttggacagcggccagcaaatatcatctcaatggccgcgactcgctggtgaatccaggaccagctatggccagtcacaaaggacgatgaagaaaaatttttccctatgcacggcaatctaatatttggcaaagaagggacaacggcaagtaacgcagaattagataatgtaatgattacggatgaagaagagattcgtaccaccaatcctgtggcaacagagcagtatggaactgtggcaaataacttgcagagctcaaatacagctcccacgactagaactgtcaatgatcagggggccttacctggcatggtgtggcaagatcgtgacgtgtaccttcaaggacctatctgggcaaagattcctcacacggatggacactttcatccttctcctctgatgggaggctttggactgaaacatccgcctcctcaaatcatgatcaaaaatactccggtaccggcaaatcctccgacgactttcagcccggccaagtttgcttcatttatcactcagtactccactggacaggtcagcgtggaaattgagtgggagctacagaaagaaaacagcaaacgttggaatccagagattcagtacacttccaactacaacaagtctgttaatgtggactttactgtagacactaatggtgtttatagtgaacctcgccctattggaacccggtatctcacacgaaacctgtaa

SEQ ID NO: 783 - DNA, 2211 bp, Artificial Sequence
  Description of Artificial Sequence: Synthetic polynucleotide
atggctgctgacggttatcttccagattggctcgaggacaacctttctgaaggcattcgtgagtggtgggctctgaaacctggagtccctcaacccaaagcgaaccaacaacaccaggacgaccgtcggggtcttgtgcttccgggttacaaatacctcggacccggtaacggactcgacaaaggagagccggtcaacgaggcggacgcggcagccctcgaacacgacaaagcttacgaccagcagctcaaggccggtgacaacccgtacctcaagtacaaccacgccgacgccgagtttcaggagcgtcttcaagaagatacgtcttttgggggcaaccttggcagagcagtcttccaggccaaaaagaggatccttgagcctcttggtctggttgaggaagcagctaaaacggctcctggaaagaagaggcctgtagatcagtctcctcaggaaccggactcatcatctggtgttggcaaatcgggcaaacagcctgccagaaaaagactaaatttcggtcagactggcgactcagagtcagtcccagaccctcaacctctcggagaaccaccagcagcccccacaagtttgggatctaatacaatggcttcaggcggtggcgcaccaatggcagacaataacgagggtgccgatggagtgggtaattcctcaggaaattggcattgcgattcccaatggctgggcaacagagtcatcaccaccagcaccagaacctgggccctgcccacttacaacaaccatctctacaagcaaatctccagccaatcaggagcttcaaacgacaaccactactttggctacagcaccccttgggggtattttgactttaacagattccactgccacttctcaccacgtgactggcagcgactcattaacaacaactggggattccggcccaagaaactcagcttcaagctcttcaacatccaagttaaagaggtcacgcagaacgatggcacgacgactattgccaataaccttaccagcacggttcaagtgtttacggactcggagtatcagctcccgtacgtgctcgggtcggcgcaccaaggctgtctcccgccgtttccagcggacgtcttcatggtccctcagtatggatacctcaccctgaacaacggaagtcaagcggtgggacgctcatccttttactgcctggagtacttcccttcgcagatgctaaggactggaaataacttccaattcagctataccttcgaggatgtaccttttcacagcagctacgctcacagccagagtttggatcgcttgatgaatcctcttattgatcagtatctgtactacctgaacagaacgcaaggaacaacctctggaacaaccaaccaatcacggctgctttttagccaggctgggcctcagtctatgtctttgcaggccagaaattggctacctgggccctgctaccggcaacagagactttcaaagactgctaacgacaacaacaacagtaactttccttggacagcggccagcaaatatcatctcaatggccgcgactcgctggtgaatccaggaccagctatggccagtcacaaggacgatgaagaaaaatttttccctatgcacggcaatctaatatttggcaaagaagggacaacggcaagtaacgcagaattagataatgtaatgattacggatgaagaagagattcgtaccaccaatcctgtggcaacagagcagtatggaactgtggcaaataacttgcagagctcaaatacagctcccacgactagaactgtcaatgatcagggggccttacctggcatggtgtggcaagatcgtgacgtgtaccttcaaggacctatctgggcaaagattcctcacacggatggacactttcatccttctcctctgatgggaggctttggactgaaacatccgcctcctcaaatcatgatcaaaaatactccggtaccggcaaatcctccgacgactttcagcccggccaagtttgcttcatttatcactcagtactccactggacaggtcagcgtggaaattgagtgggagctacagaaagaaaacagcaaacgttggaatccagagattcagtacacttccaactacaacaagtctgttaatgtggactttactgtagacactaatggtgtttatagtgaacctcgccctattggaacccggtatctcacacgaaacttgtaa

SEQ ID NO: 784 - DNA, 2211 bp, Artificial Sequence
  Description of Artificial Sequence: Synthetic polynucleotide
atggctgctgacggttatcttccagattggctcgaggacaacctttctgaaggcattcgtgagtggtgggctctgaaacctggagtccctcaacccaaagcgaaccaacaacaccaggacgaccgtcggggtcttgtgcttccgggttacaaatacctcggacccggtaacggactcgacaaaggagagccggtcaacgaggcggacgcggcagccctcgaacacgacaaagcttacgaccagcagctcaaggccggtgacaacccgtacctcaagtacaaccacgccgacgccgagtttcaggagcgtcttcaagaagatacgtcttttgggggcaaccttggcagagcagtcttccaggccaaaaagaggatccttgagcctcttggtctggttgaggaagcagctaaaacggctcctggaaagaagaggcctgtagatcagtctcctcaggaaccggactcatcatctggtgttggcaaatcgggcaaacagcctgccagaaaaagactaaatttcggtcagactggcgactcagagtcagtcccagaccctcaacctctcggagaaccaccagcagcccccacaagtttgggatctaatacaatggcttcaggcggtggcgcaccaatggcggacaataacgagggtgccgatggagtgggtaattcctcaggaaattggcattgcgattcccaatggctgggcgacagagtcatcaccaccagcaccagaacctgggccctgcccacttacaacaaccatctctacaagcaaatctccagccaatcaggagcttcaaacgacaaccactactttggctacagcaccccttgggggtattttgactttaacagattccactgccacttctcaccacgtgactggcagcgactcattaacaacaactggggattccggcccaagaaactcagcttcaagctcttcaacatccaagttaaagaggtcacgcagaacgatggcacgacgactattgccaataaccttaccagcacggttcaagtgtttacggactcggagtatcagctcccgtacgtgctcgggtcggcgcaccaaggctgtctcccgccgtttccagcggacgtcttcatggtccctcagtatggatacctcaccctgaacaacggaagtcaagcggtgggacgctcatccttttactgcctggagtacttcccttcgcagatgctaaggactggaaataacttccaattcagctataccttcgaggatgtaccttttcacagcagctacgctcacagccagagtttggatcgcttgatgaatcctcttattgatcagtatctgtactacctgaacagaacgcaaggaacaacctctggaacaaccaaccaatcacggctgctttttagccaggctgggcctcagtctatgtctttgcaggccagaaattggctacctgggccctgctaccggcaacagagactttcaaagactgctaacgacaacaacaacagtaactttccttggacagcggccagcaaatatcatctcaatggccgcgactcgctggtgaatccaggaccagctatggccagtcacaaggacgatgaagaaaaatttttccctatgcacggcaatctaatatttggcaaagaagggacaacggcaagtaacgcagaattagataatgtaatgattacggatgaagaagagattcgtaccaccaatcctgtggcaacagtgcagtatggaactgtggcaaataacttgcagagctcaaatacagctcccacgactagaactgtcaatgatcagggggccttacctggcatggtgtggcaagatcgtgacgtgtaccttcaaggacctatctgggcaaagattcctcacacggatggacactttcatccttctcctctgatgggaggctttggactgaaacatccgcctcctcaaatcatgatcaaaaatactccggtaccggcaaatcctccgacgactttcagcccggccaagtttgcttcatttatcactcagtactccactggacaggtcagcgtggaaattgagtgggagctacagaaagaaaacagcaaacgttggaatccagagattcagtacacttccaactacaacaagtctgttaatgtggactttactgtagacactaatggtgtttatagtgaacctcgccctattggaacccggtatctcacacgaaacttgtaa

SEQ ID NO: 785 - DNA, 2211 bp, Artificial Sequence
  Description of Artificial Sequence: Synthetic polynucleotide
atggctgctgacggttatcttccagattggctcgaggacaacctttctgaaggcattcgtgagtggtgggctctgaaacctggagtccctcaacccaaagcgaaccaacaacaccaggacaaccgtcggggtcttgtgcttccgggttacaaatacctcggacccggtaacggactcgacaaaggagagccggtcaacgaggcggacgcggcagccctcgaacacgacaaagcttacgaccagcagctcaaggccggtgacaacccgtacctcaagtacaaccacgccgacgccgagtttcaggagcgtcttcaagaagatacgtcttttgggggcaaccttggcagagcagtcttccaggccaaaaaggggatccttgagcctcttggtctggttgaggaagcagctaaaacggctcctggaaagaagaggcctgtagatcagtctcctcaggaaccggactcatcatctggtgttggcaaatcgggcaaacagcctgccagaaaaagactaaatttcggtcagactggcgactcagagtcagtcccagaccctcaacctctcggagaaccaccagcagcccccacaagtttgggatctaatacaatggcttcaggcggtggcgcaccaatggcagacaataacgagggtgccgatggagtgggtaattcctcaggaaattggcattgcgattcccaatggctgggcgacagagtcatcaccaccagcaccagaacctgggccctgcccacttacaacaaccatctctacaagcaaatctccagccaatcaggagcttcaaacgacaaccactactttggctacagcaccccttgggggtattttgactttaacagattccactgccacttctcaccacgtgactggcagcgactcattaacaacaactggggattccggcccaagaaactcagcttcaagctcttcaacatccaagttaaagaggtcacgcagaacgatggcacgacgactattgccaataaccttaccagcacggttcaagtgtttacggactcggagtatcagctcccgtacgtgttcgggtcggcgcaccaaggctgtctcccgccgtttccagcggacgtcttcatggtccctcagtatggatacctcaccctgaacaacggaagtcaagcggtgggacgctcatccttttactgcctggagtacttcccttcgcagatgctaaggactggaaataacttccaattcagctataccttcgaggatgtaccttttcacagcagctacgctcacagccagagttcggatcgcttgatgaatcctcttattgatcagtatctgtactacctgaacagaacgcaaggaacaacctctggaacaaccaaccaatcacggctgctttttagccaggctgggcctcagtctatgtctttgcaggccagaaattggctacctgggccctgctaccggcaacagagactttcaaagactgctaacgacaacaacaacagtaactttccttgaacagcggccagcaaatatcatctcaatggccgcgactcgctggtgaatccaggaccagctatggccagtcacaaggacgatgaagaaaaatttttccctatgcacggcaatctaatatttggcaaagaagggacaacggcaagtaacgcagaattagataatgtaatgattacggatgaagaagagattcgtaccaccaatcctgtggcaacagagcagtatggaactgtggcaaataacttgcagagctcaaatacagctcccacgactagaactgtcaatgatcagggggccttacctggcatggtgtggcaagatcgtgacgtgtaccttcaaggacctatctgggcaaagattcctcacacggatggacactttcatccttctcctctgatgggaggctttggactgaaacatccgcctcctcaaatcatgatcaaaaatactccggtaccggcaaatcctccgacgactttcagcccggccaagtttgcttcatttatcactcagtactccactggacaggtcagcgtggaaattgagtgggagctacagaaagaaaacagcaaacgttggaatccagagattcagtacacttccaactacaacaagtctgttaatgtggactttactgtagacactaatggtgtttatagtgaacctcgccctattggaacccggtatctcacacgaaacttgtaa

SEQ ID NO: 786 - DNA, 2211 bp, Artificial Sequence
  Description of Artificial Sequence: Synthetic polynucleotide
atggctgctgacggttatcttccagattggctcgaggacaacctttctgaaggcattcgtgagtggtgggctctgaaacctggagtccctcaacccaaagcgaaccaacaacaccaggacaaccgtcggggtcttgtgcttccgggttacaaatacctcggacccggtaacggactcgacgaaggagagccggtcaacgaggcggacgcggcagccctcgaacacgacaaagcttacgaccagcagctcaaggccggtgacaacccgtacctcaagtacaaccacgccgacgccgagtttcaggagcgtcttcaagaagatacgtcttttgggggcaaccttggcagagcagtcttccaggccaaaaagaggatccttgagcctcttggtctggttgagggagcagctaaaacggctcctggaaagaagaggcctgtagatcagtctcctcaggaaccggactcatcatctggtgttggcaaatcgggcaaacagcctgccagaaaaagactaaatttcggtcagactggcgactcagagtcagtcccagaccctcaacctctcggagaaccaccagcagcccccacaagtttgggatctaatacaatggcttcaggcggtggcgcaccaatggcagacaataacgagggtgccgatggagtgggtaattcctcaggaaattggcattgcgattcccaatggctgggcgacagagtcatcaccaccagcaccagaacctgggccctgcccacttacaacagccacctctacaagcaaatctccagccaatcaggagcttcaaacgacaaccactactttggctacagcaccccttgggggtattttgactttaacagattccactgccacttctcaccacgtgactggcagcgactcattaacaacaactggggattccggcccaagaaactcagcttcaagctcttcaacatccaagttaaagaggtcacgcagaacgatggcacgacgactattgccaataaccttaccagcacggttcaagtgtttacggactcggagtatcagctcccgtacgtgctcgggtcggcgcaccaaggctgtctcccgccgtttccagcggacgtcttcatggtccctcagtatggatacctcaccctgaacaacggaagtcaagcggtgggacgctcatccttttactgcctggagtacttcccttcgcagatgctaaggactggaaataacttccaattcagctataccttcgaggatgtaccttttcacagcagctacgctcacagccagagtttggatcgcttgatgaatcctcttattgatcagtatctgtactacctgaacagaacgcaaggaacaacctctggaacaaccaaccaatcacggctgctttttagccaggctgggcctcagtctatgtctttgcaggccagaaattggctacctgggccctgctaccggcaacagagactttcaaagactgctaacgacaacaacaacagtaactttccttggacagcggccagcaaatatcatctcaatggccgcgactcgctggtgaatccaggaccagctatggccagtcacaaggacgatgaagaaaaatttttccctatgcacggcaatctaatatttggcaaagaagggacaacggcaagtaacgcagaattagataatgtaatgattacggatgaagaagagattcgtaccaccaatcctgtggcaacagagcagtatggaactgtggcaaataacttgcagagctcaaatacagctcccacgactagaactgtcaatgatcagggggccttacctggcatggtgtggcaagatcgtgacgtgtaccttcaaggacctatctgggcaaagattcctcacacggatggacactttcatccttctcctctgatgggaggctttggactgaaacatccgcctcctcaaatcatgatcaaaaatactccggtaccggcaaatcctccgacgactttcagcccggccaagtttgcttcatttatcactcagtactccactggacaggtcagcgtggaaattgagtgggagctacagaaagaaaacagcaaacgttggaatccagagattcagtacacttccaactacaacaagtctgttaatgtggactttactgtagacactaatggtgtttatagtgaacctcgccctattggaacccggtatctcacacgaaacttgtaa

SEQ ID NO: 787 - DNA, 2211 bp, Artificial Sequence
  Description of Artificial Sequence: Synthetic polynucleotide
atggctgctgacggttatcttccagattggctcgaggacaacctttctgaaggcattcgtgagtggtgggctctgaaacctggagtccctcaacccaaagcgaaccaacaacaccaggacaaccgtcggggtcttgtgcttccgggttacaaatacctcggacccggtaacggactcgacaaaggagagccggtcaacgaggcggacgcggcagccctcgaacacgacaaagcttacgaccagcagctcaaggccggtgacaacccgtacctcaagtacaaccacgccgacgccgagtttcaggagcgtcttcaagaagatacgtcttttgggggcaaccttggcagagcagtcttccaggccaaaaagaggatccttgagcctcttggtctggttgagggagcagctaaaacggctcctggaaagaagaggcctgtagatcagtctcctcaggaaccggactcatcatctggtgttggcaaatcgggcaaacagcctgccagaaaaagactaaatttcggtcagactggcgactcagagtcagtcccagaccctcaacctctcggagaaccaccagcagcccccacaagtttgggatctaatacaatggcttcaggcggtggcgcaccaatggcagacaataacgagggtgccgatggagtgggtaattcctcaggaaattggcattgcgattcccaatggctgggcgacagagtcatcaccaccagcaccagaacctgggccctgcccacttacaacagccatctctacaagcaaatctccagccaatcaggagcttcaaacgacaaccactactttggctacagcaccccttggggtattttgactttaacagattccactgccacttctcaccacgtgactggcagcgactcattaacaacaactggggattccggcccaagaaactcagcttcaagctcttcaacatccaagttaaagaggtcacgcagaacgatggcacgacgactattgccaataaccttaccagcacggttcaagtgtttacggactcggagtatcagctcccgtacgtgctcgggtcggcgcaccaaggctgtctcccgccgtttccagcggacgccttcatggtccctcagtatggatacctcaccctgaacaacggaagtcaagcggtgggacgctcatccttttactgcctggagtacttcccttcgcagatgctaaggactggaaataacttccaattcagctataccctcgaggatgtaccttttcacagcagctacgctcacagccagagtttggatcgcttgatgaatcctcttattgatcagtatctgtactacctgaacagaacgcaaggaacaacctctggaacaaccaaccaatcacggctgctttttagccaggctgggcctcagtctatgtctttgcaggccagaaattggctacctgggccctgctaccggcaacagagactttcaaagactgctaacgacaacaacaacagtaactttccttggacagcggccagcaaatatcatctcaatggccgcgactcgctggtgaatccaggaccagctatggccagtcacaaaggacgatgaagaaaaatttttccctatgcacggcaatctaatatttggcaaagaagggacaacggcaagtaacgcagaattagatagtgtaatgattacggatgaagaagagattcgtaccaccaatcctgtggcaacagagcagtatggaactgtggcaaataacttgcagagctcaaatacagctcccacgactagaactgtcaatgatcagggggccttacctggcatggtgtggcaagatcgtgacgtgtaccttcaaggacctatctgggcaaagattcctcacacggatggacactttcatccttctcctctgatgggaggctttggactgaaacatccgcctcctcaaatcatgatcaaaaatactccggtaccggcaaatcctccgacgactttcagcccggccaagtttgcttcatttatcactcagtactccactggacaggtcagcgtggaaattgagtgggagctacagaaagaaaacagcaaacgttggaatccagagattcagtacacttccaactacaacaagtctgttaatgtggactttactgtagacactaatggtgtttatagtgaacctcgccctattggaacccggtatctcacacgaaacttgtaa

SEQ ID NO: 788 - DNA, 2205 bp, Artificial Sequence
  Description of Artificial Sequence: Synthetic polynucleotide
atgactgacggttaccttccagattggctagaggacaacctctctgagggcgttcgagagtggtgggcgctgcaacctggagcccctaaacccaaggcaaatcaacaacatcaggacaacgctcggggtcttgtgcttccgggttacaaatacctcggacccggcaacggactcgacaagggggaacccgtcaacgcagcggacgcggcagccctcgagcacgacaaggcctacgaccagcagctcaaggccggtgacaacccctacctcaagtacaaccacgccgacgcggagttccagcagcggcttcagggcgacacatcgtttgggggcaacctcggcagagcagtcttccaggccaaaaagagggttcttgaacctcttggtctggttgagcaagcgggtgagacggctcctggaaagaagagaccgttgattgaatccccccagcagcccgactcctccacgggtatcggcaaaaaaggcaagcagccggctaaaaagaagctcgttttcgaagacgaaactggagcaggcgacggaccccctgagggatcaacttccggagccatgtctgatgacagtgagatgcgtgcagcaactggcggagctgcagtcgagggcggacaaggtgccgatggagtgggtaatgcctcgggtgattggcattgcgattccacctggtctgagggccacgtcacgaccaccagcaccagaacctgggtcttgcccacctacaacaaccacctctacaagcgactcggagagagcctgcagtccaacacctacaacggattctccaccccctggggatactttgacttcaaccgcttccactgccacttctcaccacgtgactggcagcgactcatcaacaacaactggggcatgcgacccaaagccatgcgggtcaaaatcttcaacatccaggtcaaggaggtcacgacgtcgaacggcgagacaacggtggctaataaccttaccagcacggttcagatctttgcggactcgtcgtacgaactgccgtacgtgatggatgcgggtcaagagggcagcctgcctccttttcccaacgacgtctttatggtgccccagtacggctactgtggactggtgaccggcaacacttcgcagcaacagactgacagaaatgccttctactgcctggagtactttccttcgcagatgctgcggactggcaacaactttgaaattacgtacagttttgagaaggtgcctttccactcgatgtacgcgcacagccagagcctggaccggctgatgaaccctctcatcgaccagtacctgtggggactgcaatcgaccaccaccggaaccaccctgaatgccgggactgccaccaccaactttaccaagctgcggcctaccaacctttccaactttaaaaagaactggctgcccgggccttcaatcaagcagcagggcttctcaaagactgccaatcaaaactacaagatccctgccaccgggtcagacagtctcatcaaatacgagacgcacagcactctggacggaagatggagtgccctgacccccggacctccaatggccacggctggacctgcggacagcaagttcagcaacagccagctcatctttgcggggcctaaacagaacggcaacacggccaccgtacccgggactctgatcttcacctctgaggaggagctggcagccaccaacgctaccgatacggacatgtggggcaacctacctggcggtgaccagagcaacagcaacctgccgaccgtggacagactgacagccttgggagccgtgcctggaatggtctggcaaaacagagacatttactaccagggtcccatttgggccaagattcctcataccgatggacactttcacccctcaccgctgattggtgggtttgggctgaaacacccgcctcctcaaatttttatcaagaacaccccggtacctgcgaatcctgcgacgaccttcagctctactccggtaaactccttcattactcagtacagcactggccaggtgtcggtgcagattgactgggagatccagaaggagcggtccaaacgctggaaccccgaggtccagtttacctccaactacggacagcaaaactctctgttgtgggctcccgatgcggctgggaaatacactgagcctagggctatcggtacccgctacctcacccaccacctgtaa

SEQ ID NO: 789 - DNA, 2205 bp, Artificial Sequence
  Description of Artificial Sequence: Synthetic polynucleotide
atgactgacggttaccttccagattggctagaggacaacctctctgaaggcgttcgagagtggtgggcgctgcaacctggagcccctaaacccaaggcaaatcaacaacatcaggacaacgctcggggtcttgtgcttccgggttacaaatacctcggacccggcaacggactcgacaagggggaacccgtcaacgcagcggacgcggcagccctcgagcacgacaaggcctacgaccagcagctcaaggccggtgacaacccctacctcaagtacaaccacgccgacgcggagttccagcagcggcttcagggcgacacatcgtttgggggcaacctcggcagagcagtcttccaggccaaaaagagggttcttgaacctcttggtctggttgagcaagcgggtgagacggctcctggaaagaagagaccgttgattgaatccccccagcagcccgactcctccacgggtatcggcaaaaaaggcaagcagccggctaaaaagaagctcgttttcgaagacgaaactggagcaggcgacggaccccctgagggatcaacttccggagccatgtctgatgacagtgagatgcgtgcagcagctggcggagctgcagtcgagggcggacaaggtgccgatggagtgggtaatgcctcgggtgattggcattgcgattccacctggtctgagggccacgtcacgaccaccagcaccagaacctgggtcttgcccacctacaacaaccacctctacaagcgactcggagagagcctgcagtccaacacctacaacggattctccaccccctggggatactttgacttcaaccgcttccactgccacttcttaccacgtgactggcagcgactcatcaacaacaactggggcgtgcgacccaaagccatgcgggtcaaaatcttcaacatccaggtcaaggaggtcacgacgtcgaacggcgagacaacggtggctaataaccttaccagcacggttcagatctttgcggactcgtcgtacgaactgccgtacgtgatggatgcgggtcaagagggcagcctgcctccttttcccaacgacgtctttatggtgccccagtacggctactgtggactggtgaccggcgacacttcgcagcaacagactgacagaaatgccttctactgcctggagtactttccttcgcagatgctgcggactggcaacaactttgaaattacgtacagttttgagaaggtgcctttccactcgatgtacgcgcacagccagagcctggaccggctgatgaaccctctcatcgaccagtacctgtggggactgcaatcgaccaccaccggaaccaccctgaatgccgggactgccaccaccaactttaccaagctgcggcctaccaacttttccaactttaaaaagaactggctgcccgggccttcaatcaagcagcagggcttctcaaagactgccaatcaaaactacaagatccctgccaccgggtcagacagtctcatcaaatacgagacgcacagcactctggacggaagatggagtgccctgacccccggacctccaatggccacggctggacctgcggacagcaagttcagcaacagccagctcatctttgcggggcctaaacagaacggcaacacggccaccgtacccgggactctgatcttcacctctgaggaggagctggcagccaccaacgccaccgatacggacatgtggggcaacctacctggcggtgaccagagcaacagcaacctgccgaccgtggacagactgacagccttgggagccgtgcctggaatggtctggcaaaacagagacatttactaccagggtcccatttgggccaagattcctcataccgatggacactttcacccctcaccgctgattggtgggtttgggctgaaacacccgcctcctcaaatttttatcaagaacaccccggtacctgcgaatcctgcgacgaccttcagctctactccggtaaactccttcattactcagtacagcactggccaggtgtcggtgcagattgactgggagatccagaaggagcggtccaaacgctggaaccccgaggtccagtttacctccaactacggacagcaaaactctctgttgtgggctcccgatgcggctgggaaatacactgagcctagggctatcggtacccgctacctcacccaccacctgtaa

SEQ ID NO: 790 - DNA, 2205 bp, Artificial Sequence
  Description of Artificial Sequence: Synthetic polynucleotide
atgactgacggttaccttccagattggctagaggacaacctctctgaaggcgttcgagagtggtgggcgctgcaacctggagcccctaaacccaaggcaaatcaacaacatcaggacaacgctcggggtcttgtgcttccgggttacaaatacctcggacccggcaacggactcgacgagggggaacccgtcaacgcagcggacgcggcagccctcgagcacgacaaggcctacgaccagcagctcaaggccggtgacaacccctacctcaagtacaaccacgccgacgcggagttccagcagcggcttcagggcgacacatcgtttgggggcaacctcggcagagcagtcttccaggccaaaaagagggttcttgaacctcttggtctggttgagcaagcgggtgagacggctcctggaaagaagagaccgttgattgaatccccccagcagcccgactcctccacgggtatcggcaaaaaaggcaagcagccggctaaaaagaagctcgttttcgaagacgaaactggagcaggcgacggaccccctgagggatcaacttccggagccatgtctgatgacagtgagatgcgtgcagcagctggcggagctgcagtcgagggcggacaaggtgccgatggagtgggtaatgcctcgggtgattggcattgcgattccacctggtctgagggccacgtcacgaccaccagcaccagaacctgggtcttgcccacctacaacaaccacctctacaagcgactcggagagagcctgcagtccaacacctacaacggattctccaccccctggggatactttgacttcaaccgcttccactgccacttctcaccacgtgactggcagcgactcatcaacaacaactggggcatgcgacccaaagccatgcgggtcaaaatcttcaacatccaggtcaaggaggtcacgacgtcgaacggcgagacaacggtggctaataaccttaccagcacggttcagatctttgcggactcgtcgtacgaactgccgtacgtgatggatgcgggtcaagagggcagcctgcctccttttcccaacgacgtctttatggtgccccagtacggctactgtggactggtgaccggcaacacttcgcagcaacagactgacagaaatgccttctactgcctggagtactttccttcgcagatgctgcggactggcaacaactttgaaattacgtacagttttgagaaggtgcctttccactcgatgtacgcgcacagccagagcctggaccggctgatgaaccctctcatcgaccagtacctgtggggactgcaatcgaccaccaccggaaccaccctgaatgccgggactgccaccaccaactttaccaagctgcggcctaccaacttttccaactttaaaaagaactggctgcccgggccttcaatcaagcagcagggcttctcaaagactgccaatcaaaactacaagatccctgccaccgggtcagacagtctcatcaaatacgagacgcacagcactctggacggaagatggagtgccctgacccccggacctccaatggccacggctggacctgcggacagcaagttcagcaacagccagctcatctttgcggggcctaaacagaacggcaacacggccaccgtacccgggactctgatcttcacctctgaggaggagctggcagccaccaacgctaccgatacggacatgtggggcaacctacctggcggtgaccagagcaacagcaacctgccgaccgtggacagactgacagccttgggagccgtgcctggaatggtctggcaaaacagagacatttactaccagggtcccatttgggccaagattcctcataccgatggacactttcacccctcaccgctgattggtgggtttgggctgaaacacccgcctcctcaaatttttatcaagaacaccccggtacctgcgaatcctgcgacgaccttcagctctactccggtaaactccttcattactcagtacagcactggccaggtgtcggtgcagattgactgggagatccagaaggagcggtccaaacgctggaaccccgaggtccagtttacctccaactacggacagcaaaactctctgttgtgggctcccgatgcggctgggaaatacactgagcctagggctatcggtacccgctacctcacccaccacctgtaa

SEQ ID NO: 791 - DNA, 2205 bp, Artificial Sequence
  Description of Artificial Sequence: Synthetic polynucleotide
atgactgacggttaccttccagattggctagaggacaacctctctgaaggcgttcgagagtggtgggcgctgcaacctggagcccctaaacccaaggcaaatcaacaacatcaggacaacgctcggggtcttgtgcttccgggttacaaatacctcggacccggcaacggactcgacaagggggaacccgtcaacgcagcggacgcggcagccctcgagcacgacaaggcctacgaccagcagctcaaggccggtgacaacccctacctcaagtacaaccacgccgacgcggagttccagcagcggcttcagggcgacacatcgtttgggggcaacctcggcagagcagtcttccaggccaaaaagagggttcttgaacctcttggtctggttgagcaagcgggtgagacggctcctggaaagaagagaccgttgattgaatccccccagcagcccgactcctccacgggtatcggcaaaaaaggcaagcagccggctaaaaagaagctcgttttcgaagacggaactggagcaggcgacggaccccctgagggatcaacttccggagccatgtctgatgacagtgagatgcgtgcagcagctggcggagctgcagtcgagggcggacaaggtgccgatggagtgggtaatgcctcgggtgattggcattgcgattccacctggtctgagggccacgtcacgaccaccagcaccagaacctgggtcttgcccacctacaacaaccacctctacaagcgactcggagagagcctgcagtccaacacctacaacggattccccaccccctggggatactttgacttcaaccgcttccactgccacttctcaccacgtgactggcagcgactcatcaacaacaactggggcatgcgacccaaagccatgcgggtcaaaatcttcaacatccaggtcaaggaggtcacgacgtcgaacggcgagacaacggcggctaataaccttaccagcacggttcagatctttgcggactcgtcgtacgaactgccgtacgtgatggatgcgggtcaagagggcagcctgcctccttttcccaacgacgtctttatggtgccccagtacggctactgtggactggtgaccggcaacacttcgcagcaacagactgacagaaatgccttctactgcctggagtactttccttcgcagatgctgcggactggcaacaactttgaaattacgtacagttttgagaaggtgcctttccactcgatgtacgcgcacagccagagcctggaccggctgatgaaccctctcatcgaccagtacctgtggggactgcaatcgaccaccaccggaaccaccctgaatgccgggactgccaccaccaactttaccaagctgcggcctaccaacttttccaactttaaaaagaactggctgcccgggccttcaatcaagcagcagggcttctcaaagactgccaatcaaaactacaagatccctgccaccgggtcagacagtctcatcaaatacgagacgcacagcactctggacggaagatggagtgccctgacccccggacctccaatggccacggctggacctgcggacagcaagttcagcaacagccagctcatctttgcggggcctaaacagaacggcaacacggccaccgtacccgggactctgatcttcacctctgaggaggagctggcagccaccaacgccaccgatacggacatgtggggcaacctacctggcggtgaccagagcaacagcaacctgccgaccgtggacagactgacagccttgggagccgtgcctggaatggtctggcaaaacagagacatttactaccagggtcccatttgggccaagattcctcataccgatggacactttcacccctcaccgctgattggtgggtttgggctgaaacacccgcctcctcaaatttttatcaagaacaccccggtacctgcgaatcctgcgacgaccttcagctctactccggtaaactccttcattactcagtacagcactggccaggtgtcggtgcagattgactgggagatccagaaggagcggtccaaacgctggaaccccgaggtccagtttacctccaactacggacagcaaaactctctgttgtgggctcccgatgcggctgggaaatacactgagcctagggctatcggtacccgctacctcacccaccacctgtaa

SEQ ID NO: 792 - DNA, 2205 bp, Artificial Sequence
  Description of Artificial Sequence: Synthetic polynucleotide
atgactgacggttaccttccagattggctagaggacaacctctctgaaggcgttcgagagtggtgggcgctgcaacctggagcccctaaacccaaggcaaatcaacaacatcaggacaacgctcggggtcttgtgcttccgggttacaaatacctcggacccggcaacggactcgacaagggggaacccgtcaacgcagcggacgcggcagccctcgagcacgacaaggcctacgaccagcagctcaaggccggtgacaacccctacctcaagtacaaccacgccgacgcggagttccagcagcggcttcagggcgacacatcgtttgggggcaacctcggcagagcagtcttccaggccaaaaagagggttcttgaacctcttggtctggttgagcaagcgggtgagacggctcctggaaagaagagaccgttgattgaatccccccagcagcccgactcctccacgggtatcggcaaaaaaggcaagcagccggctaaaaagaagctcgttttcgaagacgaaactggagcaggcgacggaccccctgagggatcaacttccggagccatgtctgatgacagtgagatgcgtgcagcagctggcggagctgcagtcgagggcggacaaggtgccgatggagtgggtaatgcctcgggtgattggcattgcgattccacctggtctgagggccacgtcacgaccaccagcaccagaacctgggtcttgcccacctacaacaaccacctctacaagcgactcggagagagcctgcagtccaacacctacaacggattctccaccccctggggatactttgacttcaaccgcttccactgccacttctcaccacgtgactggcagcgactcatcaacaacaactggggcatgcgacccaaagccatgcgggtcaaaatcttcaacatccaggtcaaggaggtcacgacgtcgaacggcgagacaacggtggctaataaccttaccagcacggttcagatctttgcggactcgtcgtacgaactgccgtacgtgatggatgcgggtcaagagggcagcctgcctccttttcccaacgacgtctttatggtgccccagtacggctaccgtggactggtgaccggcaacacttcgcagcaacagactgacagaaatgccttctactgcctggagtactttccttcgcagatgctgcggactggcaacaactttgaaattacgtacagttttgagaaggtgcctttccactcgatgtacgcgcacagccagagcctggaccggctgatgaaccctctcatcgaccagtacctgtggggactgcaatcgaccaccaccggaaccaccctgaatgccgggactgccaccaccaactttaccaagctgcggcctaccaacttttccaactttaaaaagaactggctgcccgggccttcaatcaagcagcagggcttctcaaagactgccaatcaaaactacaagatccctgccaccgggtcagacagtctcatcaaatacgagacgcacagcactctggacggaagatggagtgccctgacccccggacctccaatggccacggctggacctgcggacagcaagttcagcaacagccagctcatctttgcggggcctaaacagaacggcaacacggccaccgtacccgggactctgatcttcacctctgaggaggagctggcagccaccaacgccaccgatacggacatgtggggcaacctacctggcggtgaccagagcaacagcaacctgccgaccgtggacagactgacagccttgggagccgtgcctggaatggtctggcaaaacagagacatttactaccagggtcccatttgggccaagattcctcataccgatggacactttcacccctcaccgctgattggtgggtttgggctgaaacacccgcctcctcaaatttttatcaagaacaccccggtacctgcgaatcctgcgacgaccttcagctctactccggtaaactccttcattactcagtacagcactggccaggtgtcggtgcagattgactgggagatccagaaggagcggtccaaacgctggaaccccgaggtccagtttacctccaactacggacagcaaaactctctgttgtgggctcccgatgcggctgggaaatacactgagcctagggctatcggtacccgctacctcacccaccacctgtaa

SEQ ID NO: 793 - DNA, 2205 bp, Artificial Sequence
  Description of Artificial Sequence: Synthetic polynucleotide
atgactgacggttaccttccagattggctagaggacaacctctctgaaggcgttcgagagtggtgggcgctgcaacctggagcccctaaacccaaggcaaatcaacaacatcaggacaacgctcggggtcttgtgcttcagggttacaaatacctcggacccggcaacggactcgacaagggggaacccgtcaacgcagcggacgcggcagccctcgagcacgacaaggcctacgaccagcagctcaaggccggtgacaacccctacctcaagtacaaccacgccgacgcggagttccagcagcggcttcagggcgacacatcgtttgggggcaacctcggcagagcagtcttccaggccaaaaagagggttcttgaaccccttggtctggttgagcaagcgggtgagacggctcctggaaagaagagaccgttgattgaatccccccagcagcccgactcctccacgggtatcggcaaaaaaggcaagcagccggctaaaaagaagctcgttttcgaagacgaaactggagcaggcgacggaccccctgagggatcaacttccggagccatgtctgatgacagtgagatgcgtgcagcagctggcggagctgcagtcgagggcggacaaggtgccgatggagtgggtaatgcctcgggtgattggcattgcgattccacccggtctgagggccacgtcacgaccaccagcaccagaacctgggtcttgcccacctacaacaaccacctctacaagcgactcggagagagcctgcagtccaacacctacaacggattctccaccccctggggatactttgacttcaaccgcttccactgccacttctcaccacgtgactggcagcgactcatcaacaataactggggcatgcgacccaaagccatgcgggtcaaaatcttcaacatccaggtcaaggaggtcacgacgtcgaacggcgagacaacggtggctaataaccttaccagcacggttcagatctttgcggactcgtcgtacgaactgccgtacgtgatggatgcgggtcaagagggcagcctgcctccttttcccaacgacgtctttatggtgccccagtacggctactgtggactggtgaccggcaacacttcgcagcaacagactgacagaaatgccttctactgcctggagtactttccttcgcagatgctgcggactggcaacaactttgaaattacgtacagttttgagaaggtgcctttccactcgatgtacgcgcacagccagagcctggaccggctgatgaaccctctcatcgaccagtacctgtggggactgcaatcgaccaccaccggaaccaccctgaatgccgggactgccaccaccaactttaccaagctgcggcctaccaacttttccaactttaaaaagaactggctgcccgggccttcaatcaagcagcagggcttctcaaagactgccaatcaaaactacaagatccctgccaccgggtcagacagtctcatcaaatacgagacgcacagcactctggacggaagatggagtgcccggacccccggacctccaatggccacggctggacctgcggacagcaagttcagcaacagccagctcatctttgcggggcctaaacagaacggcaacacggccaccgtacccgggactctgatcttcacctctgaggaggagctggcagccaccaacgccaccgatacggacatgtggggcaacctacctggcggtgaccagagcaacagcaacctgccgaccgtggacagactgacagccttgggagccgtgcctggaatggtctggcaaaacagagacatttactaccagggtcccatttgggccaagattcctcataccgatggacactttcacccctcaccgctgattggtgggtttgggctgaaacacccgcctcctcaaatttttatcaagaacaccccggtacctgcgaatcctgcgacgaccttcagctctactccggtaaactccttcattactcagtacagcactggccaggtgtcggtgcagattgactgggagatccagaaggagcggtccaaacgctggaaccccgaggtccagtttacctccaactacggacagcaaaactctctgttgtgggctcccgatgcggctgggaaatacactgagcctagggctatcggtacccgctacctcacccaccacctgtaa

SEQ ID NO: 794 - DNA, 2175 bp, Artificial Sequence
  Description of Artificial Sequence: Synthetic polynucleotide
atgtcttttgttgatcaccctccagattggttggaagaagttggtgaaggtcttcgcgagtttttgggccttgaagcgggcccaccgaaaccaaaacccaatcagcagcatcaagatcaagcccgtggtcttgtgctgcctggttataactatctcggacccggaaacggtctcgatcgaggagagcctgtcaacagggcagacgaggtcgcgcgagagcacgacatctcgtacaacgagcagcttgaggcgggagacaacccctacctcaagtacaaccacgcggacgccgagtttcaggagaggctcgccgacgacacatccttcgggggaaacctcggaaaggcagtctttcaggccaagaaaagggttctcgaaccttttggcctggttgaagagggtgctaagacggcccctaccggaaagcggatagacgaccactttccaaaaagaaagaaggcccggaccgaagaggactccaagccttccacctcgtcagacgccgaagctggacccagcggatcccagcagctgcaaatcccagcccaaccagcctcaagtttgggagctgatacaatgtctgcgggaggtggcggcccattgggcgacaataaccaaggtgccgatggagtgggcaatgcctcgggagattggcattgcgattccacgtggatgggggacagagtcgtcaccaagtccacccgaacctgggtgctgcccagctacaacaaccaccagtaccgagagatcaaaagcggctccgtcgacggaagcaacgccaacgcctactttggatacagcaccccctgggggtactttgactttaaccgcttccacagccactggagcccccgagactggcaaagactcatcaacaactactggggcttcagaccccggtccctcagagtcaaaatcttcaacattcaagtcaaagaggtcacggtgcaggactccaccaccaccatcgccaacaacctcacctccaccgtccaagtgtttacggacgacgactaccagctgccctacgtcgtcggcaacgggaccgagggatgcctgccggccttccctccgcaggtctttacgctgccgcagtacggttacgcgacgctgaaccgcgacaacacagaaaatcccaccgagaggagcagcttcttctgcctagagtactttcccagcaagatgctgagaacgggcaacaactttgagtttacctacaactttgaggaggtgcccttccactccagcttcgctcccagtcagaacctcttcaagctggccaacccgctggtggaccagtacttgtaccgcttcgtgagcacaaataacactggcggagtccagttcaacaagaacctggccgggagatacgccaacacctacaaaaactggttcccggggcccatgggccgaacccagggctggaacctgggctccggggtcaaccgcgccagtgtcagcgccttcgccacgaccaataggatggagctcgagggcgcgagttaccaggtgcccccgcagccgaacggcatgaccaacaacctccagggcagcaacacctatgccctggagaacactatgatcttcaacagccagccggcgaacccgggcaccaccgccacgtacctcgagggcaacatgctcatcaccagcgagagcgagacgcagccggtgaaccgcgtggcgtacaacgtcggcgggcagatggccaccaacaaccagagctccaccactgcccccgcgaccggcacgtacaacctccaggaaatcgtgcccggcagcgtgtggatggagagggacgtgtacctccaaggacccatctgggccaagatcccagagacggaggcgcactttcacccctctccggccatgggcggattcggactcaaacacccaccgcccatgatgctcatcaagaacacgcctgtgcccggaaatatcaccagcttctcggacgtgcccgtcagcagcttcatcacccagtacagcaccgggcaggtcaccgtggagatggagtgggagctcaagaaggaaaactccaagaggtggaacccagagatccagtacacaaacaactacaacgacccccagtttgtggactttgccccggacagcaccggggaatacagaaccaccagacctatcggaacccgataccttacccgacccctttaa

SEQ ID NO: 795 - DNA, 2175 bp, Artificial Sequence
  Description of Artificial Sequence: Synthetic polynucleotide
atgtcttttgttgatcaccctccagattggttggaagaagttggtgaaggtcttcgcgagtttttgggccttgaagcgggcccaccgaaaccaaaacccaatcagcagcatcaagatcaagcccgtggtcttgtgctgcctggttataactatctcggacccggaaacggtctcgatcgaggagagcctgtcaacagggcagacgaggtcgcgcgagagcacgacatctcgtacaacgagcagcttgaggcgggagacaacccctacctcaagtacaaccacgcggacgccgagtttcaggagaagctcgccgacgacacatcctccgggggaaacctcggaaaggcagtctttcaggccaagaaaagggttctcgaaccttttggcctggttgaagagggtgctaagacggcccctaccggaaagcggatagacgaccactttccaaaaagaaagaaggcccggaccgaagaggactccaagccttccacctcgtcagacgccgaagctggacccagcggatcccagcagctgcaaatcccagcccaaccagcctcaagtttgggagctgatacaatgtctgcgggaggtggcggcccattgggcgacaataaccaaggtgccgatggagtgggcaatgcctcgggagattggcattgcgattccacgtggatgggggacagagtcgtcaccaagtccacccgaacctgggtgctgcccagctacaacaaccaccagtaccgagagatcaaaagcggctccgtcgacggaagcaacgccaacgcctactttggatacagcaccccctgggggtactttgactttaaccgcttccacagccactggagcccccgagactggcaaagactcatcaacaactactggggcttcagaccccggtccctcagagtcaaaatcttcaacattcaagtcaaagaggtcacggtgcaggactccaccaccaccatcgccaacaacctcacctccaccgtccaagtgtttacggacgacgactaccagctgccctacgtcgtcggcaacgggaccgagggatgcctgccggccttccctccgcaggtctttacgctgccgcagtacggttacgcgacgctgaaccgcgacaacacagaaaatcccaccgagaggagcagcttcttctgcctagagtactttcccagcaagatgctgagaacgggcaacaactttgagtttacctacaactttgaggaggtgcccttccactccagcttcgctcccagtcagaacctcttcaagctggccaacccgctagtggaccagtacttgtaccgcttcgtgagcacaaataacactggcggagtccagttcaacaagaacctggccgggagatacgccaacacctacaaaaactggttcccggggcccatgggccgaacccagggctggaacctgggctccggggtcaaccgcgccagtgtcagcgccttcgccacgaccaataggatggagctcgagggcgcgagttaccaggtgcccccgcagccgaacggcatgaccaacaacctccagggcagcaacacctatgccctggagaacactatgatcttcaacagccagccggcgaacccgggcaccaccgccacgtacctcgagggcaacatgctcatcaccagcgagagcgagacgcagccggtgaaccgcgtggcgtacaacgtcggcgggcagatggccaccaacaaccagagctccaccactgcccccgcgaccggcacgtacaacctccaggaaatcgtgcccggcagcgtgtggatggagagggacgtgtacctccaaggacccatctgggccaagatcccagagacgggggcgcactttcacccctctccggccatgggcggattcggactcaaacacccaccgcccatgatgctcatcaagaacacgcctgtgcccggaaatatcaccagcttctcggacgtgcccgtcagcagcttcatcacccagtacagcaccgggcaggtcaccgtggagatggagtgggagctcaagaaggaaaactccaagaggtggaacccagagatccagtacacaaacaactacaacgacccccagtttgtggactttgccccggacagcaccggggaatacagaaccaccagacctatcggaacccgataccttacccgacccctttaa

SEQ ID NO: 796 - DNA, 2175 bp, Artificial Sequence
  Description of Artificial Sequence: Synthetic polynucleotide
atgtcttttgttgatcaccctccagattggttggaagaagttggtgaaggtcttcgcgagtttttgggccttgaagcgggcccaccgaaaccaaaacccaatcagcagcatcaagatcaagcccgtggtcttgtgctgcctggttataactatctcggacccggaaacggtctcgatcgaggagagcctgtcaacagggcagacgaggtcgcgcgagagcacgacatctcgtacaacgagcagcttgaggcgggagacaacccctacctcaagtacaaccacgcggacgccgagtttcaggagaagctcgccgacgacacatccttcgggggaaacctcggaaaggcagtctttcaggccaagaaaagggttctcgaaccttttggcctggttgaagagggtgctaagacggcccctaccggaaagcggatagacgaccactttccaaaaagaaagaaggcccggaccgaagaggactccaagccttccacctcgtcagacgccgaagctggacccagcggatcccagcagctgcaaatcccagcccaaccagcctcaagtttgggagctgatacaatgtctgcgggaggtggcggcccattgggcgacaataaccaaggtgccgatggagtgggcaatgcctcgggagattggcattgcgattccacgtggatgggggacagagtcgtcaccaagtccacccgaacctgggtgctgcccagctacaacaaccaccagtaccgagagatcaaaagcggctccgtcgacggaagcaacgccaacgcctactttggatacagcaccccctgggggtactttgactttaaccgcttccacagccactggagcccccgagactggcaaagactcatcaacaactactggggcttcagaccccggtccctcagagtcaaaatcttcaacattcaagtcaaagaggtcacggtgcaggactccaccaccaccatcgccaacaacctcacctccaccgtccaagtgtttacggacgacgactaccagctgccctacgtcgtcggcaacgggaccgagggatgcctgccggccttccctccgcaggtctttacgctgccgcagtacggttacgcgacactgaaccgcgacaacacagaaaatcccaccgagaggagcagcttcttctgcctagagtactttcccagcaagatgctgagaacgggcaacaactttgagtttacctacaactttgaggaggtgcccttccactccagcttcgctcccagtcagaacctcttcaagctggccaacccgctggtggaccagtacttgtaccgcttcgtgagcacaaataacactggcggagtccagttcaacaagaacctggccgggagatacgccaacacctacaaaaactggttcccggggcccatgggccgaacccagggctggaacctgggctccggggtcaaccgcgccagtgtcagcgccttcgccacgaccaataggatggagctcgagggcgcgagttaccaggtgcccccgcagccgaacggcatgaccaacaacctccagggcagcaacacctatgccctggagaacactatgatcttcaacagccagccggcgaacccgggcaccaccgccacgtacctcgagggcaacatgctcatcaccagcgagagcgagacgcagccggtgaaccgcgtggcgtacaacgtcggcgggcagatggccaccaacaaccagagctccaccactgcccccgcgaccggcacgtacaacctccaggaaatcgtgcccggcagcgtgtggatggagagggacgtgtacctccaaggacccatctgggccaagatcccagagacgggggcgcactttcacccctctccggccatgggcggattcggactcaaacacccaccgcccatgatgctcatcaagagcacgcctgtgcccggaaatatcaccagcttctcggacgtgcccgtcagcagcttcatcacccagtacagcaccgggcaggtcaccgtggagatggagtgggagctcaagaaggaaaactccaagaggtggaacccagagatccagtacacaaacaactacaacgacccccagtttgtggactttgccccggacagcaccggggaatacagaaccaccagacctatcggaacccgataccttacccgacccctttaa

SEQ ID NO: 797 - DNA, 2175 bp, Artificial Sequence
  Description of Artificial Sequence: Synthetic polynucleotide
atgtcttttgttgatcaccctccagattggttggaagaagttggtgaaggtcttcgcgagtttttgggccctgaagcgggcccaccgaaaccaaaacccaatcagcagcatcaagatcaagcccgtggtcttgtgctgcctggttataactatctcggacccggaaacggtctcgatcgaggagagcctgtcaacagggcagacgaggtcgcgcgagagcacgacatctcgtacaacgagcagcttgaggcgggagacaacccctacctcaagtacaaccacgcggacgccgagtttcaggagaagctcgccgacgacacatccttcgggggaaacctcggaaaggcagtctttcaggccaagaaaagggttctcgaaccttttggcctggttgaagagggtgctaagacggcccctaccggaaagcggatagacgaccactttccaaaaagaaagaaggtccggaccgaagaggactccaagccttccacctcgtcagacgccgaagctggacccagcggatcccagcagctgcaaatcccagcccaaccagcctcaagtttgggagctgatacaatgtctgcgggaggtggcggcccattgggcgacaataaccaaggtgccgatggagtgggcaatgcctcgggagattggcattgcgattccacgtggatgggggacagagtcgtcaccaagtccacccgaacctgggtgccgcccagctacaacaaccaccagtaccgagagatcaaaagcggctccgtcgacggaagcaacgccaacgcctactttggatacagcaccccctgggggtactttgactttaaccgcttccacagccactggagcccccgagactggcaaagactcatcaacaactactggggcttcagaccccggtccctcagagtcaaaatcttcaacattcaagtcaaagaggtcacggtgcaggactccaccaccaccatcgccaacaacctcacctccaccgtccaagtgtttacggacgacgactaccagctgccctacgtcgtcggcaacgggaccgagggatgcctgccggccttccctccgcaggtctttacgctgccgcagtacggttacgcgacgctgaaccgcgacaacacagaaaatcccaccgagaggagcagcttcttctgcctagagtactttcccagcaagatgctgagaacgggcaacaactttgagtttacctacaactttgaggaggtgcccttccactccagcttcgctcccagtcagaacctcttcaagctggccaacccgctggtggaccagtacttgtaccgcttcgtgagcacaaataacactggcggagtccagttcaacaagaacctggccgggagatacgccaacacctacaaaaactggttcccggggcccatgggccgaacccagggctggaacctgggctccggggtcaaccgcgccagtgtcagcgccttcgccacgaccaataggatggagctcgagggcgcgagttaccaggtgcccccgcagccgaacggcatgaccaacaacctccagggcagcaacacctatgccctggagaacactatgatcttcaacagccagccggcgaacccgggcaccaccgccacgtacctcgagggcaacatgctcatcaccagcgagagcgagacgcagccggtgaaccgcgtggcgtgcaacgtcggcgggcagatggccaccaacaaccagagctccaccactgcccccgcgaccggcacgtacaacctccaggaaatcgtgcccggcagcgtgtggatggagagggacgtgtacctccaaggacccatctgggccaagatcccagagacgggggcgcactttcacccctctccggccatgggcggattcggactcaaacacccaccgcccatgatgctcatcaagaacacgcctgtgcccggaaatatcaccagcttctcggacgtgcccgtcagcagcttcatcacccagtacagcaccgggcaggtcaccgtggagatggagtgggagctcaagaaggaaaactccaagaggtggaacccagagatccagtacacaaacaactacaacgacccccagtttgtggactttgccccggacagcaccggggaatacagaaccaccagacctattggaacccgataccttacccgacccctttaa

SEQ ID NO: 798 - DNA, 2175 bp, Artificial Sequence
  Description of Artificial Sequence: Synthetic polynucleotide
atgtcttttgttgatcaccctccagattggttggaagaagttggtgaaggtcttcgcgagtttttgggccttgaagcgggcccaccgaaaccaaaacccaatcagcagcatcaagatcaagcccgtggtcttgtgctgcctggttataactatctcggacccggaaacggtctcgatcgaggagagcctgtcaacagggcagacgaggtcgcgcgagagcacgacatctcgtacaacgagcagcttgaggcgggagacaacccctacctcaagtacaaccacgcggacgccgagtttcaggagaagctcgccgacgacacatccttcgggggaaacctcggaaaggcagtctttcaggccaagaaaagggttctcgaaccttttggcctggttgaagagggtgctaagacggcccctaccggaaagcggatagacgaccactttccaaaaagaaagaaggcccggaccgaagaggactccaagccttccacctcgtcagacgccgaagctggacccagcggatcccagcagctgcaaatcccagcccaaccagcctcaagtttgggagctgatacaatgtctgcgggaggtggcggcccattgggcgacaataaccaaggtgccgatggagtgggcaatgcctcgggagattggcattgcgattccacgtggatgggggacagagtcgtcaccaagtccacccgaacctgggtgctgcccagctacaacaaccaccagtaccgagagatcaaaagcggctccgtcgacggaagcaacgccaacgcctactttggatacagcaccccctgggggtactttgactttaaccgcttccacagccactggagcccccgagactggcaaagactcatcaacaactactggggcttcagaccccggtccctcagagtcaaaatcttcaacattcaagtcaaagaggtcacggtgcaggactccaccaccaccatcgccaacaacctcacctccaccgtccaagtgtttacggacgacgactaccagctgccctacgtcgtcggcaacgggaccgagggatgcctgccggccttccctccgcaggtctttacgctgccgcagtacggttacgcgacgctgaaccgcgacaacaccgaaaatcccaccgagaggagcagcttcttctgcctagagtactttcccagcaagatgctgagaacgggcaacaactttgagtttacctacaactttgaggaggtgcccttccactccagcttcgctcccagtcagaacctcttcaagctggccaacccgctggtggaccagtacttgtaccgcttcgtgagcacaaataacactggcggagtccagttcaacaagaacctggccgggagatacgccaacacctacaaaaactggttcccggggcccatgggccgaacccagggctggaacctgggctccggggtcaaccgcgccagtgtcagcgccttcgccacgaccaataggatggagctcgagggcgcgagttaccaggtgcccccgcagccgaacggcatgaccaacaacctccagggcagcaacacctatgccctggagaacactatgatcttcaacagccagccggcgaacccgggcaccaccgccacgtacctcgagggcaacatgctcatcaccagcgagagcgagacgcagccggtgaaccgcgtggcgtacaacgtcggcgggcagatggccaccaacaaccagagctccaccactgcccccgcgaccggcgcgtacaacctccaggaaatcgtgcccggcagcgtgtggatggagagggacgtgtacctccaaggacccatctgggccaagatcccagagacgggggcgcactttcacccctctccggccatgggcggattcggactcaaacacccaccgcccatgatgctcatcaagaacacgcctgtgcccggaaatatcaccagcttctcggacgtgcccgtcagcagcttcatcacccagtacagcaccgggcaggtcaccgtggagatggagtgggagctcaagaaggaaaactccaagaggtggaacccagagatccagtacacaaacaactacaacgacccccagtttgtggactttgccccggacagcaccggggaatacagaaccaccagacctatcggaacccgataccttacccgacccctttaa

SEQ ID NO: 799 - DNA, 2175 bp, Artificial Sequence
  Description of Artificial Sequence: Synthetic polynucleotide
atgtcttttgttgatcaccctccagattggttggaagaagttggtgaaggtcttcgcgagtttttgggccttgaagcgggcccaccgaaaccaaaacccaatcagcagcatcaagatcaagcccgtggtcttgtgctgcctggttataactatctcggacccggaaacggtctcgatcgaggagagcctgtcaacagggcagacggggtcgcgcgagagcacgacatctcgtacaacgagcagcttgaggcgggagacaacccctacctcaagtacaaccacgcggacgccgagtttcaggagaagctcgccgacgacacatccttcgggggaaacctcggaaaggcagtctttcaggccaagaaaagggttctcgaaccttttggcctggttgaagagggtgctaagacggcccctaccggaaagcggatagacgaccactttccaaaaagaaagaaggcccggaccgaagaggactccaagccttccacctcgtcagacgccgaagctggacccagcggatcccagcagctgcaaatcccagcccaaccagcctcaagtttgggagctgatacaatgtctgcgggaggtggcggcccattgggcgacaataaccaaggtgccgatggagtgggcaatgcctcgggagattggcattgcgattccacgtggatgggggacagagtcgtcaccaagtccacccgaacctgggtgctgcccagctacaacaaccaccagtaccgagagatcaaaagcggctccgtcgacggaagcaacgccaacgcctactttggatacagcaccccctgggggtactttgactttaaccgcttccacagccactggagcccccgagactggcaaagactcatcaacaactactggggcttcagaccccggtccctcagagtcaaaatcttcaacattcaagtcaaagaggtcacggtgcaggactccaccaccaccatcgccaacaacctcacctccaccgtccaagcgtttacggacgacgactaccagctgccctacgtcgtcggcaacgggaccgagggatgcctgccggccttccctccgcaggtctttacgctgccgcagtacggttacgcgacgctgaaccgcgacaacacagaaaatcccaccgagaggagcagcttcttctgcctagagtactttcccagcaagatgctgagaacgggcaacaactttgagtttacctacaactttgaggaggtgcccttccactccagcttcgctcccagtcagaacctcttcaagctggccaacccgctggtggaccagtacttgtaccgcttcgtgagcacaaataacactggcggagtccagttcaacaagaacctggccgggagatacgccaacacctacaaaaactggttcccggggcccatgggccgaacccagggctggaacctgggctccggggtcaaccgcgccagtgtcagcgccttcgccacgaccaataggatggagctcgagggcgcgagttaccaggtgcccccgcagccgaacggcatgaccaacaacctccagggcagcaacacctatgccctggagaacactatgatcttcaacagccagccggcgaacccgggcaccaccgccacgtacctcgagggcaacatgctcatcaccagcgagagcgagacgcagccggtgaaccgcgtggcgtacaacgtcggcgggcagatggccaccaacaaccagagctccaccactgcccccgcgaccggcacgtacaacctccaggaaatcgtgcccggcagcgtgtggatggagagggacgtgtacctccaaggacccatctgggccaagatcccagagacgggggcgcactttcacccctctccggccatgggcggattcggactcaaacacccaccgcccatgatgctcatcaagaacacgcctgtgcccggaaatatcaccagcttctcggacgtgcccgtcagcagcttcatcacccagtacagcaccgggcaggtcaccgtggagatggagtgggagctcaagaaggaaaactccaagaggtggaacccagagatccagtacacaaacaactacaacgacccccagtttgtggactttgccccggacagcaccggggaatacagaaccaccagacctatcggaacccgataccttacccgacccctttaa

SEQ ID NO: 800 - DNA, 2175 bp, Artificial Sequence
  Description of Artificial Sequence: Synthetic polynucleotide
atgtcttttgttgatcaccctccagattggttggaagaagttggtgaaggtcttcgcgagtttttgggccttgaagcgggcccaccgaaaccaaaacccaatcagcagcatcaagatcaagcccgtggtcttgtgctgcctggttataactatctcggacccggaaacggtctcgatcgaggagagcctgtcaacagggcagacgaggtcgcgcgagagcacgacatctcgtacaacgagcagcttgaggcgggagacaacccctacctcaagtacaaccacgcggacgccgagtttcaggagaagctcgccgacgacacatccttcgggggaaacctcggaaaggcagtctttcaggccaagaaaagggttctcgaaccttttggcctggttgaagagggtgctaagacggcccctaccggaaagcggatagacgaccactttccaaaaagaaagaaggcccggaccgaagaggactccaagccttccacctcgtcagacgccgaagctggacccagcggatcccagcagctgcaaatcccagcccaaccagcctcaagtttgggagctgatacaatgtctgcgggaggtggcggcccattgggcgacaataaccaaggtgccgatggagtgggcaatgcctcgggagattggcattgcgattccacgtggatgggggacagagtcgtcaccaagtccacccgaacctgggtgctgcccagctacaacaaccaccagtaccgagagatcaaaagcggctccgtcgacggaagcaacgccaacgcctactttggatacagcaccccctgggggtactttgactttaaccgcttccacagccactggagcccccgagactggcaaagactcatcaacaactactggggcttcagaccccggtccctcagagtcaaaatcttcaacattcaagtcaaagaggtcacggtgcaggactccaccaccaccatcgccaacaacctcacctccaccgtccaagtgtttacggacgacgactaccagctgccctacgtcgtcggcaacgggaccgagggatgcctgccggccttccctccgcaggtctttacgctgccgcagtacggttacgcgacgctgaaccgcgacaacacagaaaatcccaccgagaggagcagcttcttctgcctagagtactttcccagcaagatgctgagaacgggcaacaactttgagtttacctacaactttgaggaggtgcccttccactccagcttcgctcccagtcagaacctcttcaagctggccaacccgctggtggaccagtacttgtaccgcttcgtgagcacaaataacactggcggagtccagttcaacaagaacctggccgggagatacgccaacacctacaaaaactggttcccggggcccatgggccgaacccagggctggaacctgggctccggggtcaaccgcgccagtgtcagcgccttcgccacgaccaataggatggagctcgagggcgcgagttactaggtgcccccgcagccgaacggcatgaccaacaacctccagggcagcaacacctatgccctggagaacactatgatcttcaacagccagccggcgaacccgggcaccaccgccacgtacctcgagggcaacatgctcatcaccagcgagagcgagacgcagccggtgaaccgcgtggcgtacaacgtcggcgggcagatggccaccaacaaccagagctccaccactgcccccgcgaccggcacgtacaacctccaggaaatcgtgcccggcagcgtgtggatggagggggacgtgtacctccaaggacccatctgggccaagatcccagagacgggggcgcactttcacccctctccggccatgggcggattcggactcaagcacccaccgcccatgatgctcatcaagaacacgcctgtgcccggaaatatcaccagcttctcggacgtgcccgtcagcagcttcatcacccagtacagcaccgggcaggtcaccgtggagatggagtgggagctcaagaaggaaaactccaagaggtggaacccagagatccagtacacaaacaactacaacgacccccagtttgtggactttgccccggacagcaccggggaatacagaaccaccagacctatcggaacccgataccttacccgacccctttaa

SEQ ID NO: 801 - DNA, 2175 bp, Artificial Sequence
  Description of Artificial Sequence: Synthetic polynucleotide
atgtcttttgttgatcaccctccagattggttggaagaagttggtgaaggtcttcgcgagtttttgggccttgaagcgggcccaccgaaaccaaaacccaatcagcagcatcaagatcaagcccgtggtcttgtgctgcctggttataactatctcggacccggaaacggtctcgatcgaggagagcctgtcaacagggcagacgaggtcgcgcgagagcacgacatctcgtacaacgagcagcttgaggcgggagacaacccctacctcaagtacaaccacgcggacgccgagtttcaggagaagctcgccgacgacacatccttcgggggaaacctcggaaaggcagtctttcaggccaagaaaagggttctcgaaccttttggcctggttgaagagggtgctaagacggcccctaccggaaagcggatagacgaccactttccaaaaagaaagaaggtccggaccgaagaggactccaagccttccacctcgtcagacgccgaagctggacccagcggatcccagcagctgcaaatcccagcccaaccagcctcaagtttgggagctgatacaatgtctgcgggaggtggcggcccattgggcgacaataaccaaggtgccgatggagtgggcaatgcctcgggagattggcattgcgattccacgtggatgggggacagagtcgtcaccaagtccacccgaacctgggtgctgcccagctacaacaaccaccagtaccgagagatcaaaagcggctccgtcgacggaagcaacgccaacgcctactttggatacagcaccccctgggggtactttgactttaaccgcttccacagccactggagcccccgagactggcaaagactcatcaacaactactggggcttcagaccccggtccctcagagtcaaaatcttcaacattcaagtcaaagaggtcacggtgcaggactccaccaccaccatcgccaacaacctcacctccaccgtccaagtgtttacggacgacgactaccagctgccctacgtcgtcggcaacgggaccgagggatgcctgccggccttccctccgcaggtctttacgctgccgcagtacggttacgcgacgctgaaccgcgacaacacagaaaatcccaccgagaggagcagcttcttctgcctagagtactttcccagcaagatgctgagaacgggcaacaactttgagtttacctacaactttgaggaggtgcccttccactccagcttcgctcccagtcagaacctcttcaagctggccaacccgctggtggaccagtacttgtaccgcttcgtgagcacaaataacactggcggagtccagttcaacaagaacctggccgggagatacgccaacacctacaaaaactggttcccggggcccatgggccgaacccagggctggaacctgggctccggggtcaaccgcgccagtgtcagcgccttcgccacgaccaataggatggagctcgagggcgcgagttaccaggtgcccccgcagccgaacggcatgaccaacaacctccagggcagcaacacctatgccctggagaacactatgatcttcaacagccagccggcgaacccgggcaccaccgccacgtacctcgagggcaacatgctcatcaccagcgagagcgagacgcagccggtgaaccgcgtggcgtacaacgtcggcgggcagatggccaccaacaaccagagctccaccactgcccccgcgaccggcacgtacaacctccaggaaatcgtgcccggcagcgtgtggatggagagggacgtgtacctccaaggacccatctgggccaagatcccagagacgggggcgcactttcacccctctccggccatgggcggattcggactcaaacacccaccgcccatgatgctcatcaagaacacgcctgtgcccggaaatatcaccagcttctcggacgtgcccgtcagcagcttcatcacccagtacagcaccgggcaggtcaccgtggagatggagtgggagctcaagaaggaaaactccgagaggtggaacccagagatccagtacacaaacaactacaacgacccccagtttgtggactttgccccggacagcaccggggaatacagaaccaccagacctattggaacccgataccttacccgacccctttaa

SEQ ID NO: 802 - DNA, 2175 bp, Artificial Sequence
  Description of Artificial Sequence: Synthetic polynucleotide
atgtcttttgttgatcaccctccagattggttggaagaagttggtgaaggtcttcgcgagtttttgggccttgaagcgggcccaccgaaaccaaaacccaatcagcagcatcaagatcaagcccgtggtcttgtgctgcctggttataactatctcggacccggaaacggtctcgatcgaggagagcctgtcaacagggcagacgaggtcgcgcgagagcacgacatctcgtacagcgagcagcttgaggcgggagacaacccctacctcaagtacaaccacgcggacgccgagtttcaggagaagctcgccgacgacacatccttcgggggaaacctcggaaaggcagtctttcaggccaagaaaagggttctcgaaccttttggcctggttgaagagggtgctaagacggcccctaccggaaagcggatagacgaccactttccaaaaagaaagaaggcccggaccgaagaggactccaagccttccacctcgtcagacgccgaagctggacccagcggatcccagcagctgcaaatcccagcccaaccagcctcaagtttgggagctgatacaatgtctgcgggaggtggcggcccattgggcgacaataaccaaggtgccgatggagtgggcaatgcctcgggagattggcattgcgattccacgtggatgggggacagagtcgtcaccaagtccacccgaacctgggtgctgcccagctacaacaaccaccagtaccgagagatcaaaagcggctccgtcgacggaagcaacgccaacgcctactttggatacagcaccccctgggggtactttgactttaaccgcttccacagccactggagcccccgagactggcaaagactcatcaacaactactggggcttcagaccccggtccctcagagtcaaaatcttcaacattcaagtcaaagaggtcacggtgcaggactccaccaccaccatcgccaacaacctcacctccaccgtccaagtgtttacggacgacgactaccagctgccctacgtcgtcggcaacgggaccgagggatgcctgccggccttccctccgcaggtctttacgctgccgcagtacggttacgcgacgctgaaccgcgacaacacagaaaatcccaccgagaggagcagcttcttctgcctagagtactttcccagcaagatgctgagaacgggcaacaactttgagtttacctacaactttgaggaggtgcccttccactccagcttcgctcccagtcagaacctcttcaagctggccaacccgctggtggaccagtacttgtaccgcttcgtgagcacaaataacactggcggagtccagttcaacaagaacctggccgggagatacgccaacacctacaaaaactggttcccggggcccatgggccgaacccagggctggaacctgggctccggggtcaaccgcgccagtgtcagcgccttcgccacgaccaataggatggagctcgagggcgcgagttaccaggtgcccccgcagccgaacggcatgaccaacaacctccagggcagcaacacctatgccctggagaacactatgatcttcaacagccagccggcgaacccgggcaccaccgccacgtacctcgagggcaacatgctcatcaccagcgagagcgagacgcagccggtgaaccgcgtggcgtacaacgtcggcgggcagatggccaccaacaaccagagctccaccactgcccccgcgaccggcacgtacaacctccaggaaatcgtgcccggcagcgtgtggatggagagggacgtgtacctccaaggacccatctgggccaagatcccagagacgggggcgcactttcacccctctccggccatgggcggattcggactcaaacacccaccgcccatgatgctcatcaagaacacgcctgtgcccggaaatatcaccagcttctcggacgtgcccgtcagcagcttcatcacccagtacagcaccgggcaggtcaccgtggagatggagtgggagctcaagaaggaaaactccaagaggtggaacccagagatccagtacacaaacaactacaacgacccccagtttgtggactttgccccggacagcaccggggaatacagaaccgccagacctatcggaacccgataccttacccgacccctttaa

SEQ ID NO: 803 - DNA, 2175 bp, Artificial Sequence
  Description of Artificial Sequence: Synthetic polynucleotide
atgtcttttgttgatcaccctccagattggttggaagaagttggtgaaggtcttcgcgagtttttgggccctgaagcgggcccaccgaaaccaaaacccaatcagcagcatcaagatcaagcccgtggtcttgtgctgcctggttataactatctcggacccggaaacggtctcgatcgaggagagcctgtcaacagggcagacgaggtcgcgcgagagcacgacatctcgtacaacgagcagcttgaggcgggagacaacccctacctcaagtacaaccacgcggacgccgagtttcaggagaagctcgccgacgacacatccttcgggggaaacctcggaaaggcagtctttcaggccaagaaaagggttctcgaaccttttggcctggttgaagagggtgctaagacggcccctaccggaaagcggatagacgaccactttccaaaaagaaagaaggcccggaccgaagaggactccaagccttccacctcgtcagacgccgaagctggacccagcggatcccagcagctgcaaatcccagcccaaccagcctcaagtttgggagctgatacaatgtctgcgggaggtggcggcccattgggcgacaataaccaaggtgccgatggagtgggcaatgcctcgggagattggcattgcgattccacgtggatgggggacagagtcgtcaccaagtccacccgaacctgggtgctgcccagctacaacaaccaccagtaccgagagatcaaaagcggctccgtcgacggaagcaacgccaacgcctactttggatacagcaccccctgggggtactttgactttaaccgcttccacagccactggagcccccgagactggcaaagactcatcaacaactactggggcttcagaccccggtccctcagagtcaaaatcttcaacattcaagtcaaagaggtcacggtgcaggactccaccaccaccatcgccaacaacctcacctccaccgtccaagtgtttacggacgacgactaccagctgccctacgtcgtcggcaacgggaccgagggatgcctgccggccttccctccgcaggtctttacgctgccgcagtacggttacgcgacgctgaaccgcgacaacacagaaaatcccaccgagaggagcagcttcttctgcctagagtactttcccagcaagatgctgagaacgggcaacaactttgagtttacctacaactttgaggaggtgcccttccactccagcttcgctcccagtcagaacctcttcaagctggccaacccgctggtggaccagtacttgtaccgcttcgtgagcacaaataacactggcggagtccagttcaacaagaacctggccgggagatacgccaacacctacaaaaactggttcccggggcccatgggccgaacccagggctggaacctgggctccggggtcaaccgcgccagtgtcagcgccttcgccacgaccaataggatggagctcgagggcgcgagttaccaggtgcccccgcagccgaacggcatgaccaacaacctccagggcagcaacacctatgccctggagaacactatgatcttcaacagccagccggcgaacccgggcaccaccgccacgtacctcgagggcaacatgctcatcaccagcgagagcgagacgcagccggtgaaccgcgtggcgtacaacgtcggcgggcagatgaccaccaacaaccagagctccaccactgcccccgcgaccggcacgtacaacctccaggaaatcgtgcccggcagcgtgtggatggagagggacgtgtacccccaaggacccatctgggccaagatcccagagacgggggcgcactttcacccctctccggccatgggcggattcggactcaaacacccaccgcccatgatgctcatcaagaacacgcctgtgcccggaaatatcaccagcttctcggacgtgcccgtcagcagcttcatcacccagtacagcaccgggcaggtcaccgtggagatggagtgggagctcaagaaggaaaactccaagaggtggaacccagagatccagtacacaaacaactacaacgacccccagtttgtggactttgccccggacagcaccggggaatacaggaccaccagacctatcggaacccgataccttacccgacccctttaa

SEQ ID NO: 804 - DNA, 2175 bp, Artificial Sequence
  Description of Artificial Sequence: Synthetic polynucleotide
atgtcttttgttgatcaccctccagattggttggaagaagttggtgaaggtcttcgcgagtttttgggccttgaagcgggcccaccgaaaccaaaacccaatcagcagcatcaagatcaagcccgtggtcttgtgctgcctggttataactatctcggacccggaaacggtctcgatcgaggagagcctgtcaacagggcagacgaggtcgcgcgagagcacgacatctcgtacaacgagcagcttgaggcgggagacaacccctacctcaagtacaaccacgcggacgccgagtttcaggagaagctcgccgacgacacatccttcgggggaaacctcggaaaggcagtctttcaggccaagaaaagggttctcgaaccttttggcctggttgaagagggtgctaagacggcccctaccggaaagcggatagacgaccactttccaaaaagaaagaaggcccggaccgaagaggactccaagccttccacctcgtcagacgccgaagctggacccagcggatcccagcagctgcaaatcccagcccaaccagcctcaagtttgggagctgatacaatgtctgcgggaggtggcggcccattgggcgacaataaccaaggtgccgatggagtgggcaatgcctcgggagattggcattgcgattccacgtggatgggggacagagtcgtcaccaagtccacccgaacctgggtgctgcccagctacaacaaccaccagtaccgagagatcaaaagcggctccgtcgacggaagcaacgccaacgcctactttggatacagcaccccctgggggtactttgactttaaccgcttccacagccactggagcccccgagactggcaaagactcatcaacaactactggggcttcagaccccggtccctcagagtcaaaatcttcaacattcaagtcaaagaggtcacggtgcaggactccaccaccaccatcgccaacaacctcacctccaccgtccaagtgtttacggacgacgactaccagctgccctacgtcgtcggcaacgggaccgagggatgcctgccggccttccctccgcaggtctttacgctgccgcagtacggttacgcgacgctgaaccgcgacaacacagaaaatcccaccgagaggagcagcttcctctgcctagagtactttcccagcaagatgctgagaacgggcaacaactttgagtttacctacaactttgaggaggtgcccttccactccagcttcgctcccagtcagaacctcttcaagctggccaacccgctggtggaccagtacttgtaccgcttcgtgagcacaaataacactggcggagtccagttcaacaagaacctggccgggagatacgccaacacctacaaaaactggttcccggggcccatgggccgaacccagggctggaacctgggctccggggtcaaccgcgccagtgtcagcgccttcgccacgaccaataggatggagctcgagggcgcgagttaccaggtgcccccgcagccgaacggcatgaccaacaacctccagggcagcaacacctatgccctggagaacactatgatcttcaacagccagccggcgaacccgggcaccaccgccacgtacctcgagggcaacatgctcatcaccagcgagagcgagacgcagccggtgaaccgcgtggcgtacaacgtcggcgggcagatggccaccaacaaccagagctccaccactgcccccgcgaccggcacgtacaacctccaggaaatcgtgcccggcagcgtgtggatgaagagggacgtgtacctccaaggacccatctgggccaagatcccagagacgggggcgcactttcacccctctccggccatgggcggattcggactcaaacacccaccgcccatgatgctcatcaagaacacgcctgtgcccggaaatatcaccagcttctcggacgtgcccgtcagcagcttcatcacccagtacagcaccgggcaggtcaccgtggagatggagtgggagctcaagaaggaaaactccaagaggtggaacccagagatccagtacacaaacaactacaacgacccccagtttgtggactttgccccggacagcaccggggaatacagaaccaccagacctatcggaacccgataccttacccgacccctttaa

SEQ ID NO: 805 - DNA, 2175 bp, Artificial Sequence
  Description of Artificial Sequence: Synthetic polynucleotide
atgtcttttgttgatcaccctccagattggttggaagaagttggtgaaggtcttcgcgagtttttgggccttgaggcgggcccaccgaaaccaaaacccaatcagcagcatcaagatcaagcccgtggtcttgtgctgcctggttataactatctcggacccggaaacggtctcgatcgaggagagcctgtcaacagggcagacgaggtcgcgcgagagcacgacatctcgtacaacgagcagcttgaggcgggagacaacccctacctcaagtacaaccacgcggacgccgagtttcaggagaagctcgccgacgacacatccttcgggggaaacctcggaaaggcagtctttcaggccaagaaaagggttctcgaaccttttggcctggttgaagagggtgctaagacggcccctaccggaaagcggatagacgaccactttccaaaaagaaagaaggcccggaccgaagaggactccaagccttccaccccgtcagacgccgaagctggacccagcggatcccagcagctgcaaatcccagcccaaccagcctcaagtttgggagctgatacaatgtctgcgggaggtggcggcccattgggcgacaataaccaaggtgccgatggagtgggcaatgcctcgggagattggcattgcgattccacgtggatgggggacagagtcgtcaccaagtccacccgaacctgggtgctgcccagctacaacaaccaccagtaccgagagatcaaaagcggctccgtcgacggaagcaacgccaacgcctactttggatacagcaccccctgggggtactttgactttaaccgcttccacagccactggagcccccgagactggcaaagactcatcaacaactactggggcttcagaccccggtccctcagagtcaaaatcttcaacattcaagtcaaagaggtcacggtgcaggactccaccaccaccatcgccaacaacctcacctccaccgtccaagtgtttacggacgacgactaccagctgccctacgtcgtcggcaacgggaccgagggatgcctgccggccttccctccgcaggtctttacgctgccgcagtacggttacgcgacgctgaaccgcgacaacacagaaaatcccaccgagaggagcagcttcttctgcctagagtactttcccagcaagatgctgagaacgggcaacaactttgagtttacctacaactttgaggaggtgcccttccactccagcttcgctcccagtcagaacctcttcaagctggccaacccgctggtggaccagtacttgtaccgcttcgtgagcacaaataacactggcggagtccagttcaacaagaacctggccgggagatacgccaacacctacaaaaactggttcccggggcccatgggccgaacccagggctggaacctgggctccggggtcaaccgcgccagtgtcagcgccttcgccacgaccaataggatggagctcgagggcgcgagttaccaggtgcccccgcagccgaacggcatgaccaacaacctccagggcagcaacacctatgccctggagaacactatgatcttcaacagccagccggcgaacccgggcaccaccgccacgtacctcgagggcaacatgctcatcaccagcgagagcgagacgcagccggtgaaccgcgtggcgtacaacgtcggcgggcagatggccaccaacaaccagagctccaccactgcccccgcgaccggcacgtacaacctccaggaaatcgtgcccggcagcgtgtggatggagagggacgtgtacctccaaggacccatctgggccaagatcccagagacgggggcgcactttcacccctctccggccatgggcggattcggactcaaacacccaccgcccatgatgctcatcaagaacacgcctgtgcccggaaatatcaccagcttctcggacgtgcccgtcagcagcttcatcacccagtacagcaccgggcaggtcaccgtggagatggagtgggagctcaagaaggaaaactccaagaggtggaacccagagatccagtacacaaacaactacaacgacccccagtttgtggactttgccccggacagcaccggggaatacagaaccaccagacctatcggaacccgataccttacccgacccctttaa

SEQ ID NO: 806 - DNA, 2175 bp, Artificial Sequence
  Description of Artificial Sequence: Synthetic polynucleotide
atgtcttttgttgatcaccctccagattggttggaagaagttggtgaaggtcttcgcgagtttttgggccttgaagcgggcccaccgaaaccaaaacccaatcagcagcatcaagatcaagcccgtggtcttgtgctgcctggttataactatctcggacccggaaacggtctcgatcgaggagagcctgtcaacagggcagacgaggtcgcgcgagagcacgacatctcgtacaacgagcagcttgaggcgggagacaacccctacctcaagtacaaccacgcggacgccgagtttcaggagaagctcgccgacgacacatccttcgggggaaacctcggaaaggcagtctttcaggccaagaaaagggttctcgaaccttttggcctggttgaagagggtgctaagacggcccctaccggaaagcggatagacgaccactttccaaaaagaaagaaggcccggaccgaagaggactccaagccttccacctcgtcagacgccgaagctggacccagcggatcccagcagctgcaaatcccagcccaaccagcctcaagtttgggagctgatacaatgtctgcgggaggtggcggcccattgggcgacaataaccaaggtgccgatggagtgggcaatgcctcgggagattggcattgcgattccacgtggatgggggacagagtcgtcaccaagtccacccgaacctgggtgctgcccagctacaacaaccaccagtaccgagagatcaaaagcggctccgtcgacggaagcaacgccaacgcctactttggatacagcaccccctgggggtactttgactttaaccgcttccacagccactggagcccccgagactggcaaagactcatcaacaactactggggcttcagaccccggtccctcagagtcaaaatcttcaacattcaagtcaaagaggtcacggtgcaggactccaccaccaccatcgccaacaacctcacctccaccgtccaagtgtttacggacgacgactaccagctgccctacgtcgtcggcaacgggaccgagggatgcctgccggccttccctccgcaggtctttacgctgccgcagtacggttacgcgacgctgaaccgcgacaacacagaaaatcccaccgagaggagcagcttcttctgcctagagtactttcccagcaagatgctgagaacgggcaacaactttgagtttacctacaactttgaggaggtgcccttccactccagcttcgctcccagtcagaacctcttcaagctggccaacccgctggtggaccagtacttgtaccgcttcgtgagcacaaataacactggcggagtccagttcaacaagaacctggccgggagatacgccaacacccacaaaaactggttcccggggcccatgggccgaacccagggctggaacctgggctccggggtcaaccgcgccagtgtcagcgccttcgccacgaccaataggatggagctcgagggcgcgagttaccaggtgcccccgcagtcgaacggcatgaccaacaacctccggggcagcaacacctatgccctggagaacactatgatcttcaacagccagccggcgaacccgggcaccaccgccacgtacctcgagggcaacatgctcatcaccagcgagagcgagacgcagccggtgaaccgcgtggcgtacaacgtcggcgggcagatggccaccaacaaccagagctccaccactgcccccgcgaccggcacgtacaacctccaggaaatcgtgcccggcagcgtgtggatggagagggacgtgtacctccaaggacccatctgggccaagatcccagagacgggggcgcactttcacccctctccggccatgggcggattcggactcaaacacccaccgcccatgatgctcatcaagaacacgcctgtgcccggaaatatcaccagcttctcggacgtgcccgtcagcagcttcatcacccagtacagcaccgggcaggtcaccgtggagatggagtgggagctcaagaaggaaaactccaagaggtggaacccagagatccagtacacaaacaactacaacgacccccagtttgtggactttgccccggacagcaccggggaatacagaaccaccagacctatcggaacccgataccttacccgacccctttaa

SEQ ID NO: 807 - DNA, 2175 bp, Artificial Sequence
  Description of Artificial Sequence: Synthetic polynucleotide
atgtcttttgttgatcaccctccagattggttggaagaagttggtgaaggtcttcgcgagtttttgggccttgaagcgggcccaccgaaaccaaaacccaatcagcagcatcaagatcaagcccgtggtcttgtgctgcctggttataactatctcggacccggaaacggtctcgatcgaggagagcctgtcaacagggcagacgaggtcgcgcgagagcacgacatctcgtacaacgagcagcttgaggcgggagacaacccctacctcaagtacaaccacgcggacgccgagtttcaggagaagctcgccgacgacacatccttcgggggaaacctcggaaaggcagtctttcaggccaagaaaagggttctcgaaccttttggcctggttgaagagggtgctaagacggcccctaccggaaagcggatagacgaccactttccaaaaagaaagaaggcccggaccgaagaggactccaagccttccacctcgtcagacgccgaagctggacccagcggatcccagcagctgcaaatcccagcccaaccagcctcaagtttgggagctgatacaatgtctgcgggaggtggcggcccattgggcgacaataaccaaggtgccgatggagtgggcaatgcctcgggagattggcattgcgattccacgtggatgggggacagagtcgtcaccaagtccacccgaacctgggtgctgcccagctacaacaaccaccagtaccgagagatcaaaagcggctccgtcgacggaagcaacgccaacgcctactttggatacagcaccccctgggggtactttgactttaaccgcttccacagccactggagcccccgagactggcaaagactcatcaacaactactggggcttcagaccccggtccctcagagtcaaaatcttcaacattcaagtcaaagaggtcacggtgcaggactccaccaccaccatcgccaacaacctcacctccaccgtccaagtgtttacggacgacgactaccagctgccctacgtcgtcggcaacgggaccgagggatgcctgccggccttccctccgcaggtctttacgctgccgcagtacggttacgcgacgctgaaccgcgacaacacagaaaatcccaccgagaggagcagcttcttctgcctagagtactttcccagcaagatgctgagaacgggcaacaactttgagtttacctacaactttgaggaggtgcccttccactccagcttcgctcccagtcagaacctcttcaagctggccaacccgctggtggaccagtacttgtaccgcttcgtgagcacaaataacactggcggagtccagttcaacaagaacctggccgggagatacgccaacacctacaaaaactggttcccggggcccatgggccgaacccagggctggaacctgggctccggggtcaaccgcgccagtgtcagcgccttcgccacgaccaataggatggagctcgagggcgcgagttaccaggtgcccccgcagccgaacggcatgaccaacaacctccagggcagcaacacctatgccctggagaacactatgatcttcaacagccagccggcgaacccgggcaccaccgccacgtacctcgagggcaacatgctcatcaccagcgagagcgagacgcagccggtgaaccgcgtggcgtacagcgtcggcgggcagatggccaccaacaaccagagctccaccactgcccccacgaccggcacgtacaacctccaggaaatcgtgcccggcagcgtgtggatggagagggacgtgtacctccaaggacccatctgggccaagatcccagagacgggggcgcactttcacccctctccggccatgggcggattcagactcaaacacccaccgcccatgatgctcatcaagaacacgcctgtgcccggaaatatcaccagcttctcggacgtgcccgtcagcagcttcatcacccagtacagcaccgggcaggtcaccgtggagatggagtgggagctcaagaaggaaaactccaagaggtggaacccagagatccagtacacaaacaactacaacgacccccagtttgtggactttgccccggacagcaccggggaatacagaaccaccagacctatcggaacccgataccttacccgacccctttaa

SEQ ID NO: 808 - DNA, 2175 bp, Artificial Sequence
  Description of Artificial Sequence: Synthetic polynucleotide
atgtcttttgttgatcaccctccagattggttggaagaagttggtgaaggtcttcgcgagtttttgggccttgaagcgggcccaccgaaaccaaaacccaatcagcagcatcaagatcaagcccgtggtcttgtgctgcctggttataactatctcggacccggaaacggtctcgatcgaggagagcctgtcaacagggcagacgaggtcgcgcgagagcacgacatctcgtacaacgagcagcttgaggcgggagacaacccctacctcaagtacaaccacgcggacgccgagtttcaggagaagctcgccgacgacacatccttcgggggaaacctcggaaaggcagtctttcaggccaagaaaagggttctcgaaccttttggcctggttgaagagggtgctaagacggcccctaccggaaagcggatagacgaccactttccaaaaagaaagaaggcccggaccgaagaggactccaagccttccacctcgtcagacgccgaagctggacccagcggatcccagcagctgcaaatcccagcccaaccagcctcaagtttgggagctgatacaatgtctgcgggaggtggcggcccattgggcgacaataaccaaggtgccgatggagtgggcaatgcctcgggagattggcattgcgattccacgtggatgggggacagagtcgtcaccaagtccacccgaacctgggtgctgcccagctacaacaaccaccagtaccgagagatcaaaagcggctccgtcgacggaagcaacgccaacgcctactttggatacagcaccccctgggggtactttgactttaaccgcttccacagccactggagcccccgagactggcaaagactcatcaacaactactggggcttcagaccccggtccctcagagtcaaaatcttcaacattcaagtcaaagaggtcacggtgcaggactccaccaccaccatcgccaacaacctcacctccaccgtccaagtgtttacggacgacgactaccagctgccctacgtcgtcggcaacgggaccgagggatgcctgccggccttccctccgcaggtctttacgctgccgcagtacggttacgcgacgctgaaccgcgacaacacagaaaatcccaccgagaggagcagcttcttctgcctagagtactttcccagcaagatgctgagaacgggcaacaactttgagtttacctacaactttgaggaggtgcccttccactccagcttcgctcccagtcagaacctcttcaagctggccaacccgctggtggaccagtacttgtaccgcttcgtgagcacaaataacactggcggagtccagttcaacaagaacctggccgggagatacgccaacacctacaaaaactggttcccggggcccatgggccgaacccagggctggaacctgggctccggggtcaaccgcgccagtgtcagcgccttcgccgcgaccaataggatggagctcgagggcgcgagttaccaggtgcccccgcagccgaacggcatgaccaacaacctccagggcagcaacacctatgccctggagaacactatgatcttcaacagccagccggcgaacccgggcaccaccgccacgtacctcgagggcaacatgctcatcaccagcgagagcgagacgcagccggtgaaccgcgtggcgtacaacgtcggcgggcagatggccaccaacaaccagagctccaccactgcccccgcgaccggcacgtacaacctccaggaaatcgtgcccggcggcgtgtggatggagagggacgtgtacctccaaggacccatctgggccaagatcccagagacgggggcgcactttcacccctctccggccatgggcggattcggactcaaacacccaccgcccatgatgctcatcaagaacacgcctgtgcccggaaataccaccagcttctcggacgtgcccgtcagcagcttcatcacccagtacagcaccgggcaggtcaccgtggagatggagtgggagctcaagaaggaaaactccaagaggtggaacccagagatccagtacacaaacaactacaacgacccccagtttgtggactttgccccggacagcaccggggaatacagaaccaccagacctatcggaacccgataccttacccgacccctttaa

SEQ ID NO: 809 - DNA, 2175 bp, Artificial Sequence
  Description of Artificial Sequence: Synthetic polynucleotide
atgtcttttgttgatcaccctccagattggttggaagaagttggtgaaggtcttcgcgagtttttgggccttgaagcgggcccaccgaaaccaaaacccaatcagcagcatcaagatcaagcccgtggtcttgtgctgcctggttataactatctcggacccggaaacggtctcgatcgaggagagcctgtcaacagggcagacgaggtcgcgcgagagcacgacatctcgtacaacgagcagcttgaggcgggagacaacccctacctcaagtacaaccacgcggacgccgagtttcaggagaagctcgccgacgacacatccttcgggggaaacctcggaaaggtagtctttcaggccaagaaaagggttctcgaaccttttggcctggttgaagagggtgctaagacggcccctaccggaaagcggatagacgaccactttccaaaaagaaagaaggcccggaccgaagaggactccaagccttccacctcgtcagacgccgaagctggacccagcggatcccagcagctgcaaatcccagcccaaccagcctcaagtttgggagctgatacaatgtctgcgggaggtggcggcccattgggcggcaataaccaaggtgccgatggagtgggcaatgcctcgggagattggcattgcgattccacgtggatgggggacagagtcgtcaccaagtccacccgaacctgggtgctgcccagctacaacaaccaccagtaccgagagatcaaaagcggctccgtcgacggaagcaacgccaacgcctactttggatacagcaccccctgggggtactttgactttaaccgcttccacagccactggggcccccgagactggcaaagactcatcaacaactactggggcttcagaccccggtccctcagagtcaaaatcttcaacattcaagtcaaagaggtcacggtgcaggactccaccaccaccatcgccaacaacctcacctccaccgtccaagtgtttacggacgacgactaccagctgccctacgtcgtcggcaacgggaccgagggatgcctgccggccttccctccgcaggtctttacgctgccgcagtacggttacgcgacgctgaaccgcgacaacacagaaaatcccaccgagaggagcagcttcttctgcctagagtactttcccagcaagatgctgagaacgggcaacaactttgagtttacctacaactttgaggaggtgcccttccactccagcttcgctcccagtcagaacctcttcaagctggccaacccgctggtggaccagtacttgtaccgcttcgtgagcacaaataacactggcggagtccagttcaacaagaacctggccgggagatacgccaacacctacaaaaactggttcccggggcccatgggccgaacccagggctggaacctgggctccggggtcaaccgcgccagtgtcagcgccctcgccacgaccaataggatggagctcgagggcgcgagttaccaggtgcccccgcagccgaacggcatgaccaacaacctccagggcagcaacacctatgccctggagaacactatgatcttcaacagccagccggcgaacccgggcaccaccgccacgtacctcgagggcaacatgctcatcaccagcgagagcgagacgcagccggtgaaccgcgtggcgtacaacgtcggcgggcagatggccaccaacaaccagagctccaccactgcccccgcgaccggcacgtacaacctccaggaaatcgtgcccggcagcgtgtggatggagagggacgtgtacctccaaggacccatctgggccaagatcccagagacgggggcgcactttcacccctctccggccatgggcggattcggactcaaacacccaccgcccatgatgctcatcaagaacacgcctgtgcccggaaatatcaccagcttctcggacgtgcccgtcagcagcttcatcacccagtacagcaccgggcaggtcaccgtggagatggagtgggagctcaagaaggaaaactccaagaggtggaacccagagatccagtacacaaacaactacaacgacccccagtttgtggactttgccccggacagcaccggggaatacagaaccaccagacctatcggaacccgataccttacccgacccctttaa

SEQ ID NO: 810 - DNA, 2175 bp, Artificial Sequence
  Description of Artificial Sequence: Synthetic polynucleotide
atgtcttttgttgatcaccctccagattggttggaagaagttggtgaaggtcttcgcgagtttttgggccttgaagcgggcccaccgaaaccaaaacccaatcagcagcatcaagatcaagcccgtggtcttgtgctgcctggttataactatctcggacccggaaacggtctcgatcgaggagagcctgtcaacagggcagacgaggtcgcgcgagagcacgacatctcgtacaacgagcagcttgaggcgggagacaacccctacctcaagtacaaccacgcggacgccgagtttcaggagaagctcgccgacgacacatccttcgggggaaacctcggaaaggcagtctttcaggccaagaaaagggttctcgaaccttttggcctggttgaagagggtgctaagacggcccctaccggaaagcggatagacgaccactttccaaaaagaaagaaggcccggaccgaagaggactccaagccttccacctcgtcagacgccgaagctggacccagcggatcccagcagctgcaaatcccagcccaaccagcctcaagtttgggagctgatacaatgtctgcgggaggtggcggcccattgggcgacaataaccaaggtgccgatggagtgggcaatgcctcgggagattggcattgcgattccacgtggatgggggacagagtcgtcaccaagtccacccgaacctgggtgctgcccagctacaacaaccaccagtaccgagagatcaaaagcggctccgtcgacggaagcaacgccaacgcctactttggatacagcaccccctgggggtactttgactttaaccgcttccacagccactggagcccccgagactggcaaagactcatcaacaactactggggcttcagaccccggtccctcagagtcaaaatcttcaacattcaagtcaaagaggtcacggtgcaggactccaccaccaccatcgccaacaacctcacctccaccgtccaagtgtttacggacgacgactaccagctgccctacgtcgtcggcaacgggaccgagggatgcctgccggccttccctccgcaggtctttacgctgccgcagtacggttacgcgacgctgaaccgcgacaacacagaaaatcccaccgagaggagcagcttcttctgcctagagtactttcccagcaagatgctgagaacgggcaacaactttgagtttacctacaactttgaggaggtgcccttccactccagcttcgctcccagtcagaacctcttcaagctggccaacccgctggtggaccagtacttgtaccgcttcgtgagcacaaataacactggcggagtccagttcaacaagaacctggccgggagatacgccaacacctacaaaaactggttcccggggcccatgggccgaacccagggctggaacctgggctccggggtcaaccgcgccagtgtcagcgccttcgccacgaccaataggatggagctcgagggcgcgagttaccaggtgcccccgcagccgaacggcatgaccaacaacctccagggcagcaacacctatgccctggagaacactatgatcttcaacagccagccggcgaacccgggcaccaccgccacgtacctcgagggcaacatgctcatcaccagcgagagcgagacgcagccggtgaaccgcgtggcgtacaacgtcggcgggcagatggccaccaacaaccagagctccaccactgcccccgcgaccggcacgtacaacctccaggaaatcgtgcccggcagcgtgtggatggagagggacgtgtacctccaaggacccatctgagccaagatcccagagacgggggcgcactttcacccctctccggccatgggcggattcggactcaaacacccaccgcccatgatgctcatcaagaacacgcctgtgcccggaaatatcaccagcttctcggacgtgcccgtcagcagcttcatcacccagtacagcaccgggcaggtcaccgtggagatggagtgggagctcaagaaggaaaactccaagaggtggaacccagagatccagtacacaaacaactacaacgacccccagtttgtggactttgccccggacagcaccggggaatgcagaaccaccagacctatcggaacccgataccttacccgacccctttaa

SEQ ID NO: 811 - DNA, 2175 bp, Artificial Sequence
  Description of Artificial Sequence: Synthetic polynucleotide
atgtcttttgttgatcaccctccagattggttggaagaagttggtgaaggtcttcgcgagtttttgggccttgaagcgggcccaccgaaaccaaaacccaatcagcagcatcaagatcaagcccgtggtcttgtgctgcctggttataactatctcggacccggaaacggtctcgatcgaggagagcctgtcaacagggcagacgaggtcgcgcgagagcacgacatctcgtacaacgagcagcttgaggcgggagacaacccctacctcaagtacaaccacgcggacgccgagtttcaggagaagctcgccgacgacacatccttcgggggaaacctcggaaaggcagtctttcaggccaagaaaagggttctcgaaccttttggcctggttgaagagggtgctaagacggcccctaccggaaagcggatagacgaccactttccaaaaagaaagaaggcccggaccgaagaggactccaagccttccacctcgtcagacgccgaagctggacccagcggatcccagcagctgcaaatcccagcccaaccagcctcaagtttgggagctgatacaatgtctgcgggaggtggcggcccattgggcgacaataaccaaggtgccgatggagtgggcaatgcctcgggagattggcattgcgattccacgtggatgggggacagagtcgtcaccaagtccacccgaacctgggtgctgcccagctacaacaaccaccagtaccgagagatcaaaagcggctccgtcgacggaagcaacgccaacgcctactttggatacagcaccccctgggggtactttgactttaaccgcttccacagccactggagcccccgagactggcaaagactcatcaacaactactggggcttcagaccccggtccctcagagtcaaaatcctcaacattcaagtcaaagaggtcacggtgcaggactccaccaccaccatcgccaacaacctcacctccaccgtccaagtgtttacggacgacgactaccagctgccctacgtcgtcggcaacgggaccgagggatgcctgccggccttccctccgcaggtctttacgctgccgcagtacggttacgcgacgctgaaccgcgacaacacagaaaatcccaccgagaggagcagcttcttctgcctagagtactttcccagcaagatgctgagaacgggcaacaactttgagtttacctacaactttgaggaggtgcccttccactccagcttcgctcccagtcagaacctcttcaagctggccaacccgctggtgggccagtacttgtaccgcttcgtgagcacaaataacactggcggagtccagttcaacgagaacctggccgggagatacgccaacacctacaaaaactggttcccggggcccatgggccgaacccagggctggaacctgggctccggggtcaaccgcgccagtgtcagcgccttcgccacgaccaataggatggagctcgagggcgcgagttaccaggtgcccccgcagccgaacggcatgaccaacaacctccagggcagcaacacctatgccctggagaacactatgatcttcaacagccagccggcgaacccgggcaccaccgccacgtacctcgagggcaacatgctcatcaccagcgagagcgagacgcagccggtgaaccgcgtggcgtacaacgtcggcgggcagatggccaccaacaaccagagctccaccactgcccccgcgaccggcacgtacaacctccaggaaatcgtgcccggcagcgtgtggatggagagggacgtgtacctccaaggacccatctgggccaagatcccagagacgggggcgcactttcacccctctccggccatgggcggattcggactcaaacacccaccgcccatgatgctcatcaagaacacgcctgtgcccggaaatatcaccagcttctcggacgtgcccgtcagcagcttcatcacccagtacagcaccgggcaggccaccgtggagatggagtgggagctcaagaaggaaaactccaagaggtggaacccagagatccagtacacaaacaactacaacgacccccagtttgtggactttgccccggacagcaccggggaatacagaaccaccagacctatcggaacccgataccttacccgacccctttaa

SEQ ID NO: 812 - DNA, 2175 bp, Artificial Sequence
  Description of Artificial Sequence: Synthetic polynucleotide
atgtcttttgttgatcaccctccagattggttggaagaagttggtgaaggtcttcgcgagtttttgggccttgaagcgggcccaccgaaaccaaaacccaatcagcagcatcaagatcaagcccgtggtcttgtgctgcctggttataactatctcggacccggaaacggcctcgatcgaggagagcctgtcaacagggcagacgaggtcgcgcgagagcacgacatctcgtacaacgagcagcttgaggcgggagacaacccctacctcaagtacaaccacgcggacgccgagtttcaggagaagctcgccgacgacacatccttcgggggaaacctcggaaaggcagtctttcaggccaagaaaagggttctcgaaccttttggcctggttgaagagggtgctaagacggcccctaccggaaagcggatagacgaccactttccaaaaagaaagaaggcccggaccgaagaggactccaagccttccacctcgtcagacgccgaagctggacccagcggatcccagcagctgcaaatcccagcccaaccagcctcaagtttgggagctgatacaatgtctgcgggaggtggcggcccattgggcgacaataaccaaggtgccgatggagtgggcaatgcctcgggagattggcattgcgattccacgtggatgggggacagagtcgtcaccaagtccacccgaacctgggtgctgcccagctacaacaaccaccagtaccgagagatcaaaagcggctccgtcgacggaagcaacgccaacgcctactttggatacagcaccccctgggggtactttgactttaaccgcttccacagccactggagcccccgagactggcaaagactcatcaacaactactggggcttcagaccccggtccctcagagtcaaaatcttcaacattcaagtcaaagaggtcacggtgcaggactccaccaccatcatcgccaacaacctcacctccaccgtccaagtgtttacggacgacgactaccagctgccctacgtcgtcggcaacgggaccgagggatgcctgccggccttccctccgcaggtctttacgctgccgcagtacggttacgcgacgctgaaccgcgacaacacagaaaatcccaccgagaggagcagcttcttctgcctagagtactttcccagcaagatgctgagaacgggcaacaactttgagtttacctacaactttgaggaggtgcccttccactccagcttcgcccccagtcagaacctcttcaagctggccaacccgctggtggaccagtacttgtaccgcttcgtgagcacaaataacactggcggagtccagttcaacaagaacctggccgggagatacgccaacacctacaaaaactggttcccggggcccatgggccgaacccagggctggaacctgggctccggggtcaaccgcgccagtgtcagcgccttcgccacgaccaataggatggagctcgagggcgcgagttaccaggtgcccccgcagccgaacggcatgaccaacaacctccagggcagcaacacctatgccctggagaacactatgatcttcaacagccagccggcgaacccgggcaccaccgccacgtacctcgagggcaacatgctcatcaccagcgagagcgagacgcagccggtgaaccgcgtggcgtacaacgtcggcgggcagatggccaccaacaaccagagctccaccactgcccccgcgaccggcacgtacaacctccaggaaatcgtgcccggcagcgtgtggatggagagggacgtgtacctccaaggacccatctgggccaagatcccagagacgggggcgcactttcacccctctccggccatgggcggattcggactcaaacacccaccgcccatgatgctcatcaagaacacgcctgtgcccggaaatatcaccagcttctcggacgtgcccgtcagcagcttcatcacccagtacagcaccgggcaggtcaccgtggagatggagtgggagctcaagaaggaaaactccaagaggtggaacccagagatccagtacacaaacaactacaacgacccccagtttgtggactttgccccggacagcaccggggaatacagaaccaccagacctatcggaacccgataccttacccgacccctttaa

SEQ ID NO: 813 - DNA, 2175 bp, Artificial Sequence
  Description of Artificial Sequence: Synthetic polynucleotide
atgtcttttgttgatcaccctccagattggttggaagaagttggtgaaggtcttcgcgagtttttgggccttgaagcgggcccaccgaaaccaaaacccaatcagcagcatcaagatcaagcccgtggtcttgtgctgcctggttataactatctcggacccggaaacggtctcgatcgaggagagcctgtcaacagggcagacgaggtcgcgcgagagcacgacatctcgtacaacgagcagcttgaggcgggagacaacccctacctcaagtacaaccacgcggacgccgagtttcaggagaagctcgccgacgacacatccttcgggggaaacctcggaaaggcagtctttcaggccaagaaaagggttctcgaaccttttggcctggttgaagagggtgctaagacggcccctaccggaaagcggatagacgaccactttccaaaaagaaagaaggcccggaccgaagaggactccaagccttccacctcgtcagacgccgaagctggacccagcggatcccagcagctgcaaatcccagcccaaccagcctcaagtttgggagctgatacaatgtctgcgggaggtggcggcccattgggcgacaataaccaaggtgccgatggagtgggcaatgcctcgggagattggcattgcgattccacgtggatgggggacagagtcgtcaccaagtccacccgaacctgggtgctgcccagctacaacaaccaccagtaccgagagatcaaaagcggctccgtcgacggaagcaacgccaacgcctactttggatacagcaccccctgggggtactttgactttaaccgcttccacagccactggagcccccgagactggcaaagactcatcaacaactactggggcttcagaccccggtccctcagagtcaaaatcttcaacattcaagtcaaagaggtcacggtgcaggactccaccaccaccatcgccaacaacctcacctccaccgtccaagtgtttacggacgacgactaccagctgccctacgtcgtcggcaacgggaccgagggatgcctgccggccttccctccgcaggtctttacgctgccgcagtacggttacgcgacgctgaaccgcgacaacacagaaaatcccaccgagaggagcagcttcttctgcctagagtactttcccagcaagatgctgagaacgggcaacaactttgagtttacctacaactttgaggaggtgcccttccactccagcttcgctcccagtcagaacctcttcaagctggccaacccgctggtggaccagtacttgtaccgcttcgtgagcacaaataacactggcggagtccagttcaacaagaacctggccgggagatacgccaacacctacaaaaactggttcccggggcccatgggccgaacccagggctggaacctgggctccggggtcaaccgcgccagtgtcagcgccttcgccacgaccaataggatggagctcgagggcgcgagttaccaggtgcccccgcagccgaacggcatgaccaacaacctccagggcagcaacacctatgccctggagaacactatgatcttcaacagccagccggcgaacccgggcaccaccgccacgtacctcgagggcaacatgctcatcaccagcgagagcgagacgcagccggtgaaccgcgtggcgtacaacgtcggcgggcagatggccaccaacaaccagagctccaccactgcccccgcgaccggcacgtacaacctccaggaaatcgtgcccggcagcgtgtggatggagagggacgtgtacctccaaggacccatctgggccaagatcccagagacgggggcgcactttcacccctctccggccatgggcggattcggactcaaacacccaccgcccatgatgctcatcaagaacacgcctgtgcccggaaatatcaccagcctctcggacgtgcccgtcagcagcttcatcacccagtacagcaccgggcaggtcaccgtggagatggagtgggagctcaagaaggaaaactccaagaggtggaacccagagatccagtacacaaacaactacaacgacccccagtttgtggactttgccccggacagcaccggggaatacagaaccaccagacctatcggaacccgataccttacccgacccctttaa

SEQ ID NO: 814 - DNA, 2175 bp, Artificial Sequence
  Description of Artificial Sequence: Synthetic polynucleotide
atgtcttttgttgatcaccctccagattggttggaagaagttggtgaaggtcttcgcgagtttttgggccttgaagcgggcccaccgaaaccaaaacccaatcagcagcatcaagatcaagcccgtggtcttgtgctgcctggttataactatctcggacccggaaacggtctcgatcgaggagagcctgccaacagggcagacgaggtcgcgcgagagcacgacatctcgtacaacgagcagcttgaggcgggagacaacccctacctcaagtacaaccacgcgggcgccgagtttcaggagaagctcgccgacgacacatccttcgggggaaacctcggaaaggcagtctttcaggccaagaaaagggttctcgaaccttttggcctggttgaagagggtgctaagacggcccctaccggaaagcggatagacgaccactttccaaaaagaaagaaggcccggaccgaagaggactccaagccttccacctcgtcagacgccgaagctggacccagcggatcccagcagctgcaaatcccagcccaaccagcctcaagtttgggagctgatacaatgtctgcgggaggtggcggcccattgggcgacaataaccaaggtgccgatggagtgggcaatgcctcgggagattggcattgcgattccacgtggatgggggacagagtcgtcaccaagtccacccgaacctgggtgctgcccggctacaacaaccaccagtaccgagagatcaaaagcggctccgtcgacggaagcaacgccaacgcctactttggatacagcaccccctgggggtactttgactttaaccgcttccacagccactggagcccccgagactggcaaagactcatcaacaactactggggcttcagaccccggtccctcagagtcaaaatcttcaacattcaagtcaaagaggtcacggtgcaggactccaccaccaccatcgccaacaacctcacctccaccgtccaagtgtttacggacgacgactaccagctgccctacgtcgtcggcaacgggaccgagggatgcctgccggccttccctccgcaggtctttacgctgccgcagtacggttacgcgacgctgaaccgcgacaacacagaaaatcccaccgagaggagcagcttcttctgcctagagtactttcccagcaagatgctgagaacgggcaacaactttgagtttacctacaactttgaggaggtgcccttccactccagcttcgctcccagtcagaacctcttcaagctggccaacccgctggtggaccagtacttgtaccgcttcgtgagcacaaataatactggcggagtccagttcaacaagaacctggccgggagatacgccaacacctacaaaaactggttcccggggcccatgggccgaacccagggctggaacctgggctccggggtcaaccgcgccagtgtcagcgccttcgccacgaccaataggatggagctcgagggcgcgagttaccaggtgcccccgcagccgaacggcatgaccaacaacctccagggcagcaacacctatgccctggagaacactatgatcttcaacagccagccggcgaacccgggcaccaccgccacgtacctcgagggcaacatgctcatcaccagcgagagcgagacgcagccggtgaaccgcgtggcgtacaacgtcggcgggcagatggccaccaacaaccagagctccaccactgcccccgcgaccggcacgtacaacctccaggaaatcgtgcccggcagcgtgtggatggagagggacgtgtacctccaaggacccatctgggccaagatcccagagacgggggcgcactttcacccctctccggccatgggcggattcggactcaaacacccaccgcccatgatgctcatcaagaacacgcctgtgcccggaaatatcaccagcttctcggacgtgcccgtcagcagcttcatcacccagtacagcaccgggcaggtcaccgtggagatggagtgggagctcaagaaggaaaactccaagaggtggaacccagagatccagtacacaaacaactacaacgacccccagtttgtggactttgccccggacagcaccggggaatacagaaccaccagacctatcggaacccgataccttacccgacccctttaa

SEQ ID NO: 815 - DNA, 2175 bp, Artificial Sequence
  Description of Artificial Sequence: Synthetic polynucleotide
atgtcttttgttgatcaccctccagattggttggaagaagttggtgaaggtcttcgcgagtttttgggccttgaagcgggcccaccgaaaccaaaacccaatcagcagcatcaagatcaagcccgtggtcttgtgctgcctggttataactatctcggacccggaaacggtctcgatcgaggagagcctgtcaacagggcagacgaggtcgcgcgagagcacgacatctcgtacaacgagcagcttgaggcgggagacaacccctacctcaagtacaaccacgcggacgccgagtttcaggagaagctcgccgacgacacatccttcgggggaaacctcggaaaggcagtctttcaggccaagaaaagggttctcgaaccttttggcctggttgaagagggtgctaagacggcccctaccggaaagcggatagacgaccactttccaaaaagaaagaaggcccggaccgaagaggactccaagcctcccacctcgtcagacgccgaagctggacccagcggatcccagcagctgcaaatcccagcccaaccagcctcaagtttgggagctgatacaatgtctgcgggaggtggcggcccattgggcgacaataaccaaggtgccgatggagtgggcaatgcctcgggagattggcattgcgattccacgtggatgggggacagagtcgtcaccaagtccacccgaacctgggtgctgcccagctacaacaaccaccagtaccgagagatcaaaagcggctccgtcgacggaagcaacgccaacgcctactttggatacagcaccccctgggggtactttgactttaaccgcttccacagccactggagcccccgagactggcaaagactcatcaacaactactggggcttcagaccccggtccctcagagtcaaaatcttcaacattcaagtcaaagaggtcacggtgcaggactccgccaccaccatcgccaacaacctcacctccaccgtccaagtgtttacggacgacgactaccagctgccctacgtcgtcggcaacgggaccgagggatgcctgccggccttccctccgcaggtctttacgctgccgcagtacggttacgcgacgctgaaccgcgacaacacagaaaatcccaccgagaggagcagcttcttctgcctagagtactttcccagcaagatgctgagaacgggcaacaactttgagtttacctacaactttgaggaggtgcccttccactccagcttcgctcccagtcagaacctcttcaagctggccaacccgctggtggaccagtacttgtaccgcttcgtgagcacaaataacactggcggagtccagttcaacaagaacctggccgggagatacgccaacacctacaaaaactggttcccggggcccatgggccgaacccagggctggaacctgggctccggggtcaaccgcgccagtgtcagcgccttcgccacgaccaataggatggagctcgagggcgcgagttaccaggtgcccccgcagccgaacggcatgaccaacaacctccagggcagcaacacctatgccctggagaacactatgatcttcaacagccagccggcgaacccgggcaccaccgccacgtacctcgagggcaacatgctcatcaccagcgagagcgagacgcagccggtgaaccgcgtggcgtacaacgtcggcgggcagatggccaccaacaaccagagctccaccactgcccccgcgaccggcacgtacaacctccaggaaatcgtgcccggcagcgtgtggatggagagggacgtgtacctccaaggacccatctgggccaagatcccagagacgggggcgcactttcacccctctccggccatgggcggattcggactcaaacacccaccgcccatgatgctcatcaagaacacgcctgtgcccggaaatatcaccagcttctcggacgtgcccgtcagcagcttcatcacccagtacagcaccgggcaggtcaccgtggagatggagtgggagctcaagaaggaaaactccaagaggtggaacccagagatccagtacacaaacaactacaacgacccccagtttgtggactttgccccggacagcaccggggaatacagaaccaccagacctatcggaacccgataccttacccgacccctttaa

SEQ ID NO: 816 - DNA, 2175 bp, Artificial Sequence
  Description of Artificial Sequence: Synthetic polynucleotide
atgtcttttgttgatcaccctccagattggttggaagaagttggtgaaggtcttcgcgagtttttgggccttgaagcgggcccaccgaaaccaaaacccaatcagcagcatcaagatcaagcccgtggtcttgtgctgcctggttataactatctcggacccggaaacggtctcgatcgaggagagcctgtcaacagggcagacgaggtcgcgcgagagcacgacatctcgtacaacgagcagcttgaggcgggagacaacccctacctcaagtacaaccacgcggacgccgagtttcaggagaagctcgccgacgacacatccttcgggggaaacctcggaaaggcagtctttcaggccaagaaaagggttctcgaaccttttggcctggttgaagagggtgctaagacggcccctaccggaaagcggatagacgaccactttccaaaaagaaagaaggcccggaccgaagaggactccaagccttccacctcgtcagacgccgaagctggacccagcggatcccagcagccgcaaatcccagcccaaccagcctcaagtttgggagctgatacaatgtctgcgggaggtggcggcccattgggcgacaataaccaaggtgccgatggagtgggcaatgcctcgggagattggcattgcgattccacgtggatgggggacagagtcgtcaccaagtccacccgaacctgggtgctgcccagctacaacaaccaccagtaccgagagatcaaaagcggctccgtcgacggaagcaacgccaacgcctactttggatacagcaccccctgggggtactttgactttaaccgcttccacagccactggagcccccgagactggcaaagactcatcaacaactactggggcttcagaccccggtccctcagagtcaaaatcttcaacattcaagtcaaagaggtcacggtgcaggactccaccaccaccatcgccaacaacctcacctccaccgtccaagtgtttacggacgacgactaccagctgccctacgtcgtcggcaacgggaccgagggatgcctgccggccttccctccgcaggtctttacgctgccgcagtacggttacgcgacgctgaaccgcgacaacacagaaaatcccaccgagaggagcagcttcttctgcctagagtactttcccagcaagatgctgagaacgggcaacaactttgagtttacctacaactttgaggaggtgcccttccactccagcttcgctcccagtcagaacctcttcaagctggccaacccgctggtggaccagtacttgtaccgcttcgtgagcacaaataacactggcggagtccagttcaacaagaacctggccgggagatacgccaacacctacaaaaactggttcccggggcccatgggccgaacccagggctggaacctgggctccggggtcaaccgcgccagtgtcagcgccttcgccacgaccaataggatggagctcgagggcgcgagttaccaggtgcccccgcagccgaacggcatgaccaacaacctccagggcagcaacacctatgccctggagaacactatgatcttcaacagccagccggcgaacccgggcaccaccgccacgtacctcgagggcaacatgctcatcaccagcgagagcgagacgcagccggtgaaccgcgtggcgtacaacgtcggcgggcagatggccaccaacaaccagagctccaccactgcccccgcgaccggcacgtacaacctccaggaaatcgtgcccggcagcgtgtggatggagagggacgtgtacctccaaggacccatctgggccaagatcccagagacgggggcgcactttcacccctctccggccatgggcggattcggactcaaacacccaccgcccatgatgctcatcaagaacacgcctgcgcccggaaatatcaccagcttctcggacgtgcccgtcagcagcttcatcacccagtacagcaccgggcaggtcaccgtggagatggagtgggagctcaagaaggaaaactccaagaggtggaacccagagatccagtacacaaacaactacaacgacccccagtttgtggactttgccccggacagcaccggggaatacagaaccaccagacctatcggaacccgataccttacccgacccctttaa

SEQ ID NO: 817 - DNA, 2175 bp, Artificial Sequence
  Description of Artificial Sequence: Synthetic polynucleotide
atgtcttttgttgatcaccctccagattggttggaagaagttggtgaaggtcttcgcgagtttttgggccttgaagcgggcccaccgaaaccaaaacccaatcagcagcatcaagatcaagcccgtggtcttgtgctgcctggttataactatctcggacccggaaacggtctcgatcgaggagagcctgtcaacagggcagacgaggtcgcgcgagagcacgacatctcgtacaacgagcagcttgaggcgggagacaacccctacctcaagtacaaccacgcggacgccgagtttcaggagaagctcgccgacgacacatccttcgggggaaacctcggaaaggcagtctttcaggccaagaaaagggttctcgaaccttttggcctggttgaagagggtgctaagacggcccctaccggaaagcggatagacgaccactttccaaaaagaaagaaggcccggaccgaagaggactccaagcctcccacctcgtcagacgccgaagctggacccagcggatcccagcagctgcaaatcccagcccaaccagcctcaagtttgggagctgatacaatgtctgcgggaggtggcggcccattgggcgacaataaccaaggtgccgatggagtgggcaatgcctcgggagattggcattgcgattccacgtggatgggggacagagtcgtcaccaagtccacccgaacctgggtgctgcccagctacaacaaccaccagtaccgagagatcaaaagcggctccgtcgacggaagcaacgccaacgcctactttggatacagcaccccctgggggtactttgactttaaccgcttccacagccactggagcccccgagactggcaaagactcatcaacaactactggggcttcagaccccggtccctcagagtcaaaatcttcaacattcaagtcaaagaggtcacggtgcaggactccaccaccaccatcgccaacaacctcacctccaccgtccaagtgtttacggacgacgactaccagctgccctacgtcgtcggcaacgggaccgagggatgcctgccggccttccctccgcaggtctttacgctgccgcagtacggttacgcgacgctgaaccgcgacaacacagaaaatcccaccgagaggagcagcttcttctgcctagagtactttcccagcaagatgctgagaacgggcaacaactttgagtttacctacaactttgaggaggtgcccttccactccagcttcgctcccagtcagaacctcttcaagctggccaacccgctggtggaccagtacttgtaccgcttcgtgagcacaaataacactggcggagtccagttcaacaagaacctggccgggagatacgccaacacctacaaaaactggttcccggggcccatgggccgaacccagggctggaacctgggctccggggtcaaccgcgccagtgtcagcgccttcgccacgaccaataggatggagctcgagggcgcgagttaccaggtgcccccgcagccgaacggcatgaccaacaacctccagggcagcaacacctatgccctggagaacactatgatcttcaacagccagccggcgaacccgggcaccaccgccacgtacctcgagggcaacatgctcatcaccagcgagagcgagacgcagccggtgaaccgcgtggcgtacaacgtcggcgggcagatggccaccaacaaccagagctccaccactgcccccgcgaccggcacgtacaacctccaggaaatcgtgcccggcagcgtgtggatggagagggacgtgtacctccaaggacccatctgggccaagatcccagagacgggggcgcactttcacccctctccggccatgggcggattcggactcaaacacccaccgcccatgatgctcatcaagaacacgcctgtgcccggaaatatcaccagcttctcggacgtgcccgtcagcagcttcatcacccagtacagcaccgggcaggtcaccgtggagatggagtgggagctcaagaaggaaaactccaagaggtggaacccagagatccagtacacaaacaactacaacgacccccagtttgtggactttgccccggacagcaccggggaatacagaaccaccagacctatcggaacccgataccttacccgacccctttaa

SEQ ID NO: 818 - DNA, 2175 bp, Artificial Sequence
  Description of Artificial Sequence: Synthetic polynucleotide
atgtcttttgttgatcaccctccagattggttggaagaagttggtgaaggtcttcgcgagtttttgggccttgaagcgggcccaccgaaaccaaaacccaatcagcagcatcaagatcaagcccgtggtcttgtgctgcctggttataactatctcggacccggaaacggtctcgatcgaggagagcctgtcaacagggcagacgaggtcgcgcgagagcacgacatctcgtacaacgagcagcttgaggcgggagacaacccctacctcaagtacaaccacgcggacgccgagtttcaggagaagctcgccgacgacacatccttcgggggaaacctcggaaaggcagtctttcaggccaagaaaagggttctcgaaccttttggcctggttgaagagggtgctaagacggcccctaccggaaagcggatagacgaccactttccaaaaagaaagaaggcccggaccgaagaggactccaagcctcccacctcgtcagacgccgaagctggacccagcggatcccagcagctgcaaatcccagcccaaccagcctcaagtttgggagctgatacaatgtctgcgggaggtggcggcccattgggcgacaataaccaaggtgccgatggagtgggcaatgcctcgggagattggcattgcgattccacgtggatgggggacagagtcgtcaccaagtccacccgaacctgggtgccgcccagctacaacaaccaccagtaccgagagatcaaaagcggctccgtcgacggaagcaacgccaacgcctactttggatacagcaccccctgggggtactttgactttaaccgcttccacagccactggagcccccgagactggcaaagactcatcaacaactactggggcttcagaccccggtccctcagagtcaaaatcttcaacattcaagtcaaagaggtcacggtgcaggactccaccaccaccatcgccaacaacctcacctccaccgtccaagtgtttacggacgacgactaccagctgccctacgtcgtcggcaacgggaccgagggatgcctgccggccttccctccgcaggtctttacgctgccgcagtacggttacgcgacgctgaaccgcgacaacacagaaaatcccaccgagaggagcagcttcttctgcctagagtactttcccagcaagatgctgagaacgggcaacaactttgagtttacctacaactttgaggaggtgcccttccactccagcttcgctcccagtcagaacctcttcaagctggccaacccgctggtggaccagtacttgtaccgcttcgtgagcacaaataacactggcggagtccagttcaacaagaacctggccgggagatacgccaacacctacaaaaactggttcccggggcccatgggccgaacccagggctggaacctgggctccggggtcaaccgcgccagtgtcagcgccttcgccacgaccaataggatggagctcgagggcgcgagttaccaggtgcccccgcagccgaacggcatgaccaacaacctccagggcagcaacacctatgccctggagaacactatgatcttcaacagccagccggcgaacccgggcaccaccgccacgtacctcgagggcaacatgctcatcaccagcgagagcgagacgcagccggtgaaccgcgtggcgtacaacgtcggcgggcagatggccaccaacaaccagagctccaccactgcccccgcgaccggcacgtacaacctccaggaaatcgtgcccggcagcgtgtggatggagagggacgtgtacctccaaggacccatctgggccaagatcccagagacgggggcgcactttcacccctctccggccatgggcggattcggactcaaacacccaccgcccatgatgctcatcaagaacacgcctgtgcccggaaatatcaccagcttctcggacgtgcccgtcagcagcttcatcacccagtacagcaccgggcaggtcgccgtggagatggagtgggagctcaagaaggaaaactccaagaggtggaacccagagatccagtacacaaacaactacaacgacccccagtttgtggactttgccccggacagcaccggggaatacagaaccaccagacctatcggaacccgataccttacccgacccctttaa

SEQ ID NO: 819 - DNA, 2175 bp, Artificial Sequence
  Description of Artificial Sequence: Synthetic polynucleotide
atgtcttttgttgatcaccctccagattggttggaagaagttggtgaaggtcttcgcgagtttttgggccttgaagcgggcccaccgaaaccaaaacccaatcagcagcatcaagatcaagcccgtggtcttgtgctgcctggttataactatctcggacccggaaacggtctcgatcgaggagagcctgtcaacagggcagacgaggtcgcgcgagagcacgacatctcgtacaacgagcagcttgaggcgggagacaacccctacctcaagtacaaccacgcggacgccgagtttcaggagaagctcgccgacgacacatccttcgggggaaacctcggaaaggcagtctttcaggccaagaaaagggttctcgaaccttttggcctggttgaagagggtgctaagacggcccctaccggaaagcggatagacgaccactttccaaaaagaaagaaggcccggaccgaagaggactccaagccttccacctcgtcagacgccgaagctggacccagcggatcccagcagctgcaaatcccagcccaaccagcctcaagtttgggagctgatacaatgtctgcgggaggtggcggcccattgggcgacaataaccaaggtgccgatggagtgggcaatgcctcgggagattggcattgcgattccacgtggatgggggacagagtcgtcaccaagtccacccgaacctgggtgctgcccagctacaacaaccaccagtaccgagagatcaaaagcggctccgtcgacggaagcaacgccaacgcctactttggatacagcaccccctgggggtactttgactttaaccgcttccacagccactggagcccccgagactggcaaagactcatcaacaactactggggcttcagaccccggtccctcagagtcaaaatcttcaacattcaagtcaaagaggtcacggtgcaggactccaccaccaccatcgccaacaacctcacctccaccgtccaagtgtttacggacgacgactaccagctgccctacgtcgtcggcaacgggaccgagggatgcctgccggccttccctccgcaggtctttacgctgccgcagtacggttacgcgacgctgaaccgcgacaacacagaaaatcccaccgagaggagcagcttcttctgcctagagtactttcccagcaagatgctgagaacgggcaacaactttgagtttacctacaactttgaggaggtgcccttccactccagcttcgctcccagtcagaacctcttcaagctggccaacccgctggtggaccagtacttgtaccgcttcgtgagcacaaataacactggcggagtccagttcaacaagaacctggccgggagatacgccaacacctacaaaaactggttcccggggcccatgggccgaacccagggctggaacctgggctccggggtcaaccgcgccagtgtcagcgccttcgccacgaccaataggatggagctcgagggcgcgagttaccaggtgcccccgcagccgaacggcatgaccaacaacctccagggcagcaacacctatgccctggagaacactatgatcttcaacagccagccggcgaacccgggcaccaccgccacgtacctcgagggcaacatgctcatcaccagcgagagcgagacgcagccggtgaaccgcgtggcgtacaacgtcggcgggcagatggccaccaacaaccagagctccaccactgcccccgcgaccggcacgtacaacctccaggaaatcgtgcccggcagcgtgtggatggagagggacgtgtacctccaaggacccatctgggccaagatcccagagacgggggcgcactttcacccctctccggccatgggcggattcggactcaaacacccaccgcccatgatgctcatcaagaacacgcctgcgcccggaaatatcaccagcttctcggacgtgcccgtcagcagcttcatcacccagtacagcaccgggcaggtcaccgtggagatggagtgggagctcaagaaggaaaactccaagaggtggaacccagagatccagtacacaaacaactacaacgacccccagtttgtggactttgccccggacagcaccggggaatacagaaccaccagacctatcggaacccgataccttacccgacccctttaa

SEQ ID NO: 820 - DNA, 2175 bp, Artificial Sequence
  Description of Artificial Sequence: Synthetic polynucleotide
atgtcttttgttgatcaccctccagattggttggaagaagttggtgaaggtcttcgcgagtttttgggccttgaagcgggcccaccgaaaccaaaacccaatcagcagcatcaagatcaagcccgtggtcttgtgctgcctggttataactatctcggacccggaaacggtctcgatcgaggagagcctgtcaacagggcagacgaggtcgcgcgagagcacgacatctcgtacaacgagcagcttgaggcgggagacaacccctacctcaagtacaaccacgcggacgccgagtttcaggagaagctcgccgacgacacatccttcgggggaaacctcggaaaggcagtctttcaggccaagaaaagggttctcgaaccttttggcctggctgaagagggtgctaagacggcccctaccggaaagcggatagacgaccactttccaaaaagaaagaaggcccggaccgaagaggactccaagccttccacctcgtcagacgccgaagctggacccagcggatcccagcagctgcaaatcccagcccaaccagcctcaagtttgggagctgatacaatgtctgcgggaggtggcggcccattgggcgacaataaccaaggtgccgatggagtgggcaatgcctcgggagattggcattgcgattccacgtggatgggggacagagtcgtcaccaagtccacccgaacctgggtgctgcccagctacaacaaccaccagtaccgagagatcaaaagcggctccgtcgacggaagcaacgccaacgcctactttggatacagcaccccctgggggtactttgactttaaccgcttccacagccactggagcccccgagactggcaaagactcatcaacaactactggggcttcagaccccggtccctcagagccaaaatcttcaacattcaagtcaaagaggtcacggtgcaggactccaccaccaccatcgccaacaacctcacctccaccgtccaagtgtttacggacgacgactaccagctgccctacgtcgtcggcaacgggaccgagggatgcctgccggccttccctccgcaggtctttacgctgccgcagtacggttacgcgacgctgaaccgcgacaacacagaaaatcccaccgagaggagcagcttcttctgcctagagtactttcccagcaagatgctgagaacgggcaacaaccttgagtttacctacaactttgaggaggtgcccttccactccagcttcgctcccagtcagaacctcttcaagctggccaacccgctggtggaccagtacttgtaccgcttcgtgagcacaaataacactggcggagtccagttcaacaagaacctggccgggagatacgccaacacctacaaaaactggttcccggggcccatgggccgaacccagggctggaacctgggctccggggtcaaccgcgccagtgtcagcgccttcgccacgaccaataggatggagctcgagggcgcgagttaccaggtgcccccgcagccgaacggcatgaccaacaacctccagggcagcaacacctatgccctggagaacactatgatcttcaacagccagccggcgaacccgggcaccaccgccacgtacctcgagggcaacatgctcatcaccagcgagagcgagacgcagccggtgaaccgcgtggtgcacaacgtcggcgggcagatggccaccaacaaccagagctccaccactgcccccgcgaccggcacgtacaacctccaggaaatcgtgcccggcagcgtgtggatggagagggacgtgtacctccaaggacccatctgggccaagatcccagagacgggggcgcactttcacccctctccggccatgggcggattcggactcaaacacccaccgcccatgatgctcatcaagaacacgcctgtgcccggaaatatcaccagcttctcggacgtgcccgtcagcagcttcatcacccagtacagcaccgggcaggtcaccgtggagatggagtgggagctcaagaaggaaaactccaagaggtggaacccggagatccagtacacaaacaactacaacgacccccagtttgtggactttgccccggacagcaccggggaatacagaaccaccagacctatcggaacccgataccttacccgacccctttaa

SEQ ID NO: 821 - DNA, 2175 bp, Artificial Sequence
  Description of Artificial Sequence: Synthetic polynucleotide
atgtcttttgttgatcaccctccagattggttggaagaagttggtgaaggtcttcgcgagtttttgggccttgaagcgggcccaccgaaaccaaaacccaatcagcagcatcaagatcaagcccgtggtcttgtgctgcctggttataactatctcggacccggaaacggtctcgatcgaggagagcctgtcaacagggcagacgaggtcgcgcgagagcacgacatctcgtacaacgagcagcttgaggcgggagacaacccctacctcaagtacaaccacgcggacgccgagtttcaggagaagctcgccgacgacacatccttcgggggaaacctcggaaaggcagtctttcaggccaagaaaagggttctcgaaccttttggcctggttgaagagggtgctaagacggcccctaccggaaagcggatagacgaccactttccaaaaagaaagaaggcccggaccgaagaggactccaagccttccacctcgtcagacgccgaagctggacccagcggatcccagcagctgcaaatcccagcccaaccagcctcaagtttgggagctgatacaatgtctgcgggaggtggcggcccattgggcgacaataaccaaggtgccgatggagtgggcaatgcctcgggagattggcattgcgattccacgtggatgggggacagagtcgtcaccaagtccacccgaacctgggtgctgcccagctacaacaaccaccagtaccgagagatcaaaagcggctccgtcgacggaggcaacgccaacgcctactttggatacagcaccccctgggggtactttgactttaaccgcttccacagccactggagcccccgggactggcaaagactcatcaacaactactggggcttcagaccccggtccctcagagtcaaaatcttcaacattcaagtcaaagaggtcacggtgcaggactccaccaccaccatcgccaacaacctcacctccaccgtccaagtgtttacggacgacgactaccagctgccctacgtcgtcggcaacgggaccgagggatgcctgccggccttccctccgcaggtctttacgctgccgcagtacggttacgcgacgctgaaccgcgacaacacagaaaatcccaccgagaggagcagcttcttctgcctagagtactttcccagcaagatgctgagaacgggcaacaactttgagtttacctacaactttgaggaggtgcccttccactccagcttcgctcccagtcagaacctcttcaagctggccaacccgctggtggaccagtacttgtaccgcttcgtgagcacaaataacactggcggagtccagttcaacaagaacctggccgggagatacgccaacacctacaaaaactggttcccggggcccatgggccgaacccagggctggaacctgggctccggggtcaaccgcgccagtgtcagcgccttcgccacgaccaataggatggagctcgagggcgcgagttaccaggtgcccccgcagccgaacggcatgaccaacaacctccagggcagcaacacctatgccctggagaacactatgatcttcaacagccagccggcgaacccgggcaccaccgccacgtacctcgagggcaacatgctcatcaccagcgagagcgagacgcagccggtgaaccgcgtggcgtacaacgtcggcgggcagatggccaccaacaaccagagctccaccactgcccccgcgaccggcacgtacaacctccaggaaatcgtgcccggcagcgtgtggatggagagggacgtgtacctccaaggacccatctgggccaagatcccagagacgggggcgcactttcacccctctccggccatgggcggattcggactcaaacacccaccgcccatgatgctcatcaagaacacgcctgcgcccggaaatatcaccagcttctcggacgtgcccgtcagcagcttcatcacccagtacagcaccgggcaggtcaccgtggagatggagtgggagctcaagaagggaaactccaagaggtggaacccagagatccagtacacaaacaactacaacgacccccagtttgtggactttgccccggacagcaccggggaatacagaaccaccagacctatcggaacccgataccttacccgacccctttaa

SEQ ID NO: 822 - DNA, 2175 bp, Artificial Sequence
  Description of Artificial Sequence: Synthetic polynucleotide
atgtcttttgttgatcaccctccagattggttggaagaagttggtgaaggtcttcgcgagtttttgggccttgaagcgggcccaccgaaaccaaaacccaatcagcagcatcaagatcaagcccgtggtcttgtgctgcctggttataactatctcggacccggaaacggtctcgatcgaggagagcctgtcaacagggcagacgaggtcgcgcgagagcacgacatctcgtacaacgagcagcttgaggcgggagacaacccctacctcaagtacaaccacgcggacgccgagtttcaggagaagctcgccgacgacacgtccttcgggggaaacctcggaaaggcagtctttcaggccaagaaaagggttctcgaaccttttggcctggttgaagagggtgctaagacggcccctaccggaaagcggatagacgaccactttccaaaaagaaagaaggcccggaccgaagaggactccaagccttccacctcgtcagacgccgaagctggacccagcggatcccagcagctgcaaatcccagcccaaccagcctcaagtttgggagctgatacaatgtctgcgggaggtggcggcccattgggcgacaataaccaaggtgccgatggagtgggcaatgcctcgggagattggcattgcgattccacgtggatgggggacagagtcgtcaccaagtccacccgaacctgggtgctgcccagctacaacaaccaccagtaccgagagatcaaaagcggctccgtcgacggaagcaacgccaacgcctactttggatacagcaccccctgggggtactttgactttaaccgcttccacagccactggagcccccgagactggcaaagactcatcaacaactactggggcttcagaccccggtccctcagagtcaaaatcttcaacattcaagtcaaagaggtcacggtgcaggactccaccaccaccatcgccaacaacctcacctccaccgtccaagtgtttacggacgacgactaccagctgccctacgtcgtcggcaacgggaccgagggatgcctgccggccttccctccgcaggtctttacgctgccgcagtacggttacgcgacgctgaaccgcgacaacacagaaaatcccaccgagaggagcagcttcttctgcctagagtactttcccagcaagatgctgagaacgggcaacaactttgagtttacctacaactttgaggaggtgcccttccactccagcttcgctcccagtcagaacctcttcaagctggccaacccgctggtggaccagtacttgtaccgcttcgtgagcacaaataacactggcggagtccagttcaacaagaacctggccgggagatacgccaacacctacaaaaactggttcccggggcccatgggccgaacccagggctggaacctgggctccggggtcaaccgcgccagtgtcagcgccttcgccacgaccaataggatggagctcgagggcgcgagttaccaggtgcccccgcagccgaacggcatgaccaacaacctccagggcagcaacacctatgccctggagaacactatgatcttcaacagccagccggcgaacccgggcaccaccgccacgtacctcgagggcaacatgctcatcaccagcgagagcgagacgcagccggtgaaccgcgtggcgtacaacgtcggcgggcagatggccaccaacaaccagagctccaccactgcccccgcgaccggcacgtacaacctccaggaaatcgtgcccggcagcgtgtggatggagagggacgtgtacctccaaggacccatctgggccaagatcccagagacgggggtgcactttcacccctctccggccatgggcggattcggactcaaacacccaccgcccatgatgctcatcaagaacacgcctgtgcccggaaatatcaccagcttctcggacgtgcccgtcagcagcttcatcacccagtacagcaccgggcaggtcaccgtggagatggagtgggagctcaagaaggaaaactccaagaggtggaacccagagatccagtacacaaacaactacaacgacccccagtttgtggactttgccccggacagcaccggggaatacagaaccaccagacctatcggaacccgataccttacccgacccctttaa

SEQ ID NO: 823 - DNA, 2175 bp, Artificial Sequence
  Description of Artificial Sequence: Synthetic polynucleotide
  modified_base (1652)..(1652): a, c, g, or t
atgtcttttgttgatcaccctccagattggttggaagaagttggtgaaggtcttcgcgagtttttgggccttgaagcgggcccaccgaaaccaaaacccaatcagcagcatcaagatcaagcccgtggtcttgtgctgcctggttataactatctcggacccggaaacggtctcgatcgaggagagcctgtcaacagggcagacgaggtcgcgcgagagcacgacatctcgtacaacgagcagcttgaggcgggagacaacccctacctcaagtacaaccacgcggacgccgagtttcaggagaagctcgccgacgacacatccttcgggggaaacctcggaaaggcagtctttcaggccaagaaaagggttctcgaaccttttggcctggttgaagagggtgctaagacggcccctaccggaaagcggatagacgaccactttccaaaaagaaagaaggcccggaccgaggaggactccaagccttccacctcgtcagacgccgaagctggacccagcggatcccagcagctgcaaatcccagcccaaccagcctcaagtttgggagctgatacaatgtctgcgggaggtggcggcccattgggcgacaataaccaaggtgccgatggagtgggcaatgcctcgggagattggcattgcgattccacgtggatgggggacagagtcgtcaccaagtccacccgaacctgggtgctgcccagctacaacaaccaccagtaccgagagatcaaaagcggctccgtcgacggaagcaacgccaacgcctactttggatacagcaccccctgggggtactttgactttaaccgcttccacagccactggagcccccgagactggcaaagactcatcaacaactactggggcttcagaccccggtccctcagagtcaaaatcttcaacattcaagtcaaagaggtcacggtgcaggactccaccaccaccatcgccaacaacctcacctccaccgtccaagtgtttacggacgacgactaccagctgccctacgtcgtcggcaacgggaccgagggatgcctgccggccttccctccgcaggtctttacgctgccgcagtacggttacgcgacgctgaaccgcgacaacacagaaaatcccaccgagaggagcagcttcttctgcctagagtactttcccagcaagatgctgagaacgggcaacaactttgagtttacctacaactttgaggaggtgcccttccactccagcttcgctcccagtcagaacctcttcaagctggccaacccgctggtggaccagtacttgtaccgcttcgtgagcacaaataacactggcggagtccagttcaacaagaacctggccgggagatacgccaacacctacaaaaactggttcccggggcccatgggccgaacccagggctggaacctgggctccggggtcaaccgcgccagtgtcagcgccttcgccacgaccaataggatggagctcgagggcgcgagttaccaggtgcccccgcagccgaacggcatgaccaacaacctccagggcagcaacacctatgccctggagaacactatgatcttcaacagccagccggcgaacccgggcaccaccgccacgtacctcgagggcagcatgctcatcaccancgagagcgagacgcagccggtgaaccgcgtggcgtacaacgtcggcgggcagatggccaccaacaaccagagctccaccactgcccccgcgaccggcacgtacaacctccaggaaatcgtgcccggcagcgtgtggatggagagggacgtgtacctccaaggacccatctgggccaagatcccagagacgggggcgcactttcacccctctccggccatgggcggattcggactcaaacacccaccgcccatgatgctcatcaagaacacgcctgtgcccggaaatatcaccagcttctcggacgtgcccgtcagcagcttcatcacccagtacagcaccgggcaggtcaccgtggagatggagtgggagctcaagaaggaaaactccaagaggtggaacccagagatccagtacacaaacaactacaacgacccccagtttgtggactttgccccggacagcaccggggaatacagaaccaccagacctatcggaacccgataccttacccgacccctttaa

SEQ ID NO: 824 - DNA, 2211 bp, Artificial Sequence
  Description of Artificial Sequence: Synthetic polynucleotide
atggctgctgacggttatcttccagattggctcgaggacaacctttctgaaggcattcgtgagtggtgggctctgaaacctggagtccctcaacccaaagcgaaccaacaacaccaggacaaccgtcggggtcttgtgcttccgggttacaaatacctcggacccggtaacggactcgacaaaggagagccggtcaacgaggcggacgcggcagccctcgaacacgacaaagcttacgaccagcagctcaaggccggtgacaacccgtacctcaagtacaaccacgccgacgccgagtttcaggagcgtcttcaagaagatacgtcttttgggggcaaccttggcagagcagtcttccaggccaaaaagaggatccttgagcctcttggtctggttgaggaagcagctaaaacggctcctggaaagaagaggcctgtagatcagtctcctcaggaaccggactcatcatctggtgttggcaaatcgggcaaacagcctgccagaaaaagactaaatttcggtcagactggcgactcagagtcagtcccagaccctcaacctctcggagaaccaccagcagcccccacaagtttgggatctaatacaatggcttcaggcggtggcgcaccaatggcagacaataacgagggtgccgatggagtgggtaattcctcaggaaattggcattgcgattcccaatggctgggcgacagagtcatcaccaccagcaccagaacctgggccctgcccacttacaacaaccatctctacaagcaaatctccagccaatcaggagcttcaaacgacaaccactactttggctacagcaccccttgggggtattttgactttaacagattccactgccacttctcaccacgtgactggcagcgactcattaacaacaactggggattccggcccaagaaactcagcttcaagctcttcaacatccaagttaaagaggtcacgcagaacgatggcacgacgactattgccaataaccttaccagcacggttcaagtgtttacggactcggagtatcagctcccgtacgtgctcgggtcggcgcaccaaggctgtctcccgccgtttccagcggacgtcttcatggtccctcagtatggatacctcaccctgaacaacggaagtcaagcggtgggacgctcatccttttactgcctggagtacttcccttcgcagatgctaaggactggaaataacttccaattcagctataccttcgaggatgtaccttttcacagcagctacgctcacagccagagtttggatcgcttgatgaatcctcttattgatcagtatctgtactacctgaacagaacgcaaggaacaacctctggaacaaccaaccaatcacggctgctttttagccaggctgggcctcagtctatgtctttgcaggccagaaattggctacctgggccctgctaccggcaacagagactttcaaagactgctaacgacaacaacaacagtaactttccttggacagcggccagcaaatatcatctcaatggccgcgactcgctggtgaatccaggaccagctatggccagtcacaaggacgatgaagaaaaatttttccctatgcacggcaatctaatatttggcaaagaagggacaacggcaagtaacgcagaattagataatgtaatgattacggatgaagaagagattcgtaccaccaatcctgtggcaacagagcagtatggaactgtggcaaataacttgcagagctcaaatacagctcccacgactagaactgtcaatgatcagggggccttacctggcatggtgtggcaagatcgtgacgtgtaccttcaaggacctatctgggcaaagattcctcacacggatggacactttcatccttctcctctgatgggaggctttggactgaaacatccgcctcctcaaatcatgatcaaaaatactccggtaccggcaaatcctccgacgactttcagcccggccaagtttgcttcatttatcactcagtactccactggacaggtcagcgtggaaattgagtgggagctacagaaagaaaacagcaaacgttggaatccagagattcagtacacttccaactacaacaagtctgttaatgtggactttactgtagacactaatggtgtttatagtgaacctcgccctattggaacccggtatctcacacgaaacttgtaa

SEQ ID NO: 825 - DNA, 2205 bp, Artificial Sequence; identical to SEQ ID NO: 93
  Description of Artificial Sequence: Synthetic polynucleotide

SEQ ID NO: 826 - DNA, 2234 bp, Artificial Sequence
  Description of Artificial Sequence: Synthetic polynucleotide
atgtcttttgttgatcaccctccagattggttggaagaagttggtgaaggtcttcgcgagtttttgggccttgaagcgggcccaccgaaaccaaaacccaatcagcagcatcaagatcaagcccgtggtcttgtgctgcctggttataactatctcggacccggaaacggtctcgatcgaggagagcctgtcaacagggcagacgaggtcgcgcgagagcacgacatctcgtacaacgagcagcttgaggcgggagacaacccctacctcaagtacaaccacgcggacgccgagtttcaggagaagctcgccgacgacacatccttcgggggaaacctcggaaaggcagtctttcaggccaagaaaagggttctcgaaccttttggcctggttgaagagggtgctaagacggcccctaccggaaagcggatagacgaccactttccaaaaagaaagaaggctcggaccgaagaggactccaagccttccacctcgtcagacgccgaagctggacccagcggatcccagcagctgcaaatcccagcccaaccagcctcaagtttgggagctgatacaatgtctgcgggaggtggcggcccattgggcgacaataaccaaggtgccgatggagtgggcaatgcctcgggagattggcattgcgattccacgtggatgggggacagagtcgtcaccaagtccacccgaacctgggtgctgcccagctacaacaaccaccagtaccgagagatcaaaagcggctccgtcgacggaagcaacgccaacgcctactttggatacagcaccccctgggggtactttgactttaaccgcttccacagccactggagcccccgagactggcaaagactcatcaacaactactggggcttcagaccccggtccctcagagtcaaaatcttcaacattcaagtcaaagaggtcacggtgcaggactccaccaccaccatcgccaacaacctcacctccaccgtccaagtgtttacggacgacgactaccagctgccctacgtcgtcggcaacgggaccgagggatgcctgccggccttccctccgcaggtctttacgctgccgcagtacggttacgcgacgctgaaccgcgacaacacagaaaatcccaccgagaggagcagcttcttctgcctagagtactttcccagcaagatgctgagaacgggcaacaactttgagtttacctacaactttgaggaggtgcccttccactccagcttcgctcccagtcagaacctgttcaagctggccaacccgctggtggaccagtacttgtaccgcttcgtgagcacaaataacactggcggagtccagttcaacaagaacctggccgggagatacgccaacacctacaaaaactggttcccggggcccatgggccgaacccagggctggaacctgggctccggggtcaaccgcgccagtgtcagcgccttcgccacgaccaataggatggagctcgagggcgcgagttaccaggtgcccccgcagccgaacggcatgaccaacaacctccagggcagcaacacctatgccctggagaacactatgatcttcaacagccagccggcgaacccgggcaccaccgccacgtacctcgagggcaacatgctcatcaccagcgagagcgagacgcagccggtgaaccgcgtggcgtacaacgtcggcgggcagatggccaccaacaaccagagctccaccactgcccccgcgaccggcacgtacaacctccaggaaatcgtgcccggcagcgtgtggatggagagggacgtgtacctccaaggacccatctgggccaagatcccagagacgggggcgcactttcacccctctccggccatgggcggattcggactcaaacacccaccgcccatgatgctcatcaagaacacgcctgtgcccggaaatatcaccagcttctcggacgtgcccgtcagcagcttcatcacccagtacagcaccgggcaggtcaccgtggagatggagtgggagctcaagaaggaaaactccaagaggtggaacccagagatccagtacacaaacaactacaacgacccccagtttgtggactttgccccggacagcaccggggaatacagaaccaccagacctatcggaacccgataccttacccgacccctttaacccattcatgtcgcataccctcaataaaccgtgtattcgtgtcagtaaaatactgcctc

SEQ ID NO: 827 - protein, 736 aa, Artificial Sequence
  Description of Artificial Sequence: Synthetic polypeptide
MAADGYLPDWLEDNLSEGIREWWALKPGVPQPKANQQHQDNRRGLVLPGYKYLGPGNGLDKGEPVNEADAAALEHDKAYDQQLKAGDNPYLKYNHADAEFQERLQEDTSFGGNLGRAVFQAKKRILEPLGLVEEAAKTAPGKKRPVDQSPQEPDSSSGVGKSGKQPARKRLNFGQTGDSESVPDPQPLGEPPAAPTSLGSNTMASGGGAPMADNNEGADGVGNSSGNWHCDSQWLGDRVITTSTRTWALPTYNNHLYKQISSQSGASNDNHYFGYSTPWGYFDFNRFHCHFSPRDWQRLINNNWGFRPKKLSFKLFNIQVKEVTQNDGTTTIANNLTSTVQVFTDSEYQLPYVLGSAHQGCLPPFPADVFMVPQYGYLTLNNGSQAVGRSSFYCPEYFPSQMLRTGNNFQFSYTFEDVPFHSSYAHSQSLDRLMNPLIDQYLYYLNRTQGTTSGTTNQSRLLFSQAGPQSMSLQARNWLPGPCYRQQRLSKTANDNNNSNFPWTAASKYHLNGRDSLVNPGPAMASHKDDEEKFFPMHGNLIFGKEGTTASNAELDNVMITDEEEIRTTNPVATEQYGTVANNLQSSNTAPTTRTVNDQGALPGMVWQDRDVYLQGPIWAKIPHTDGHFHPSPLMGGFGLKHPPPQIMIKNTPVPANPPTTFSPAKFASFITQYSTGQVSVEIEWELQKENSKRWNPEIQYTSNYNKSVNVDFTVDTNGVYSEPHPIGTRYLTRNL

SEQ ID NO: 828 - protein, 736 aa, Artificial Sequence
  Description of Artificial Sequence: Synthetic polypeptide
MAADGYLPDWLEDNLSEGIREWWALKPGVPQPKANQQHQDNRRGLVLPGYKYLGPGNGLDKGEPVNEADAAALEHDKAYDQQLKAGDNPYLKYNHADAEFQERLQEDTSFGGNLGRAVFQAKKRILEPLGLVEEAAKTAPGKKRPVDQSPQEPDSSSGVGKSGKQPARKRLNFGQTGDSESVPDPQPLGEPPAAPTSLGSNTMASGGGAPMADNNEGADGVGNSSGNWHCDSQWLGDRVITTSTRTWALPTYNNHLYKQISSQSGASNDNHYFGYSTPWGYFDFNRFHCHFSPRDWQRLINNNWGFRPKKLSFKLFNIQVKEVTQNDGTTTVANNLTSTVQVFTDSEYQLPYVLGSAHQGCLPPFPADVFMVPQYGYLTLNNGSQAVGRSSFYCLEYFPSQMLRTGNNFQFSYTFEDVPFHSSYAHSQSLDRLMNPLIDQYLYYLNRTQGTTSGTTNQSRLLFSQAGPQSMSLQARNWLPGPCYRQQRLSKTANDNNNSNFPWTAASKYHLNGRDSLVNPGPAMASHKDDEEKFFPMHGNLIFGKEGTTASNAELDNVMITDEEEIRTTNPVATEQYGTVANNLQSSNTAPTTRTVNDQGALPGMVWQDRDVYLQGPIWAKIPHTDGHFHPSPLMGGFGLKHPPPQIMIKNTPVPANPPTTFSPAKFASFITQYSTGQVSVEIEWELQKENSKRWNPEIQYTSNYNKSVNVDFTVDTNGVYSEPRPIGTRYLTRNL

SEQ ID NO: 829 - protein, 736 aa, Artificial Sequence
  Description of Artificial Sequence: Synthetic polypeptide
MAADGYLPDWLEDNLSEGIREWWALKPGVPQPKANQQHQDNRRGLVLPGYKYLGPGNGLDKGEPVNEADAAALEHDKAYDQQLKAGDNPYLKYNHADAEFQERLQEDTSFGGNLGRAVFQAKKRILEPLGLVEEAAKTAPGKKRPVDQSPQEPDSSSGVGKSGKQPARKRLNFGQTGDSESVPDPQPLGEPPAAPTSLGSNTMASGGGAPMADNNEGADGVGNSSGNWHCDSQWLGDRVITTSTRTWALPTYNNHLYKQISGQSGASNDNHYFGYSTPWGYFDFNRFHCHFSPRDWQRLINNNWGFRPKKLSFKLFNIQVKEVTQNDGTTTIANNLTSTVQVFTDSEYQLPYVLGSAHQGCLPPFPADVFMVPQYGYLTLNNGSQAVGRSSFYCLEYFPSQMLRTGNNFQFSYTFEDVPFHSSYAHSQSLDRLMNPLIDQYLYYLNRTQGTTSGTTNQSRLLFSQAGPQSMSLQARNWLPGPCYRQQRLSKTANGNNNSNFPWTAASKYHLNGRDSLVNPGPAMASHKDDEEKFFPMHGNLIFGKEGTTASNAELDNVMITDEEEIRTTNPVATEQCGTVANNLQSSNTAPTTRTVNDQGALPGMVWQDRDVYLQGPIWAKIPHTDGHFHPSPLMGGFGLKHPPPQIMIKNTPVPANPPTTFSPAKFASFITQYSTGQVSVEIEWELQKENSKRWNPEIQYTSNYNKSVNVDFTVDTNGVYSEPRPIGTRYLTRNL

SEQ ID NO: 830 - protein, 736 aa, Artificial Sequence
  Description of Artificial Sequence: Synthetic polypeptide
MAADGYLPDWLEDNLSEGIREWWALKPGVPQPKANQQHQDNRRGLVLPGYKYLGPGNGLDKGEPVNEADAAALEHDKAYDQQLKAGDNPYLKYNHADAEFQERLQEDTSFGGNLGRAVFQAKKRILEPLGLVEGAAKTAPGKKRPVDQSPQEPDSSSGVGKSGKQPARKRLNFGQTGDSESVPDPQPLGEPPAAPTSLGSNTMASGGGAPMADNNEGADGVGNSSGNWHCDSQWLGDRVITTSTRTWALPTYNSHLYKQISSQSGASNDNHYFGYSTPWGYFDFNRFHCHFSPRDWQRLINNNWGFRPKKLSFKLFNIQVKEVTQNDGTTTIANNLTSTVQVFTDSEYQLPYVLGSAHQGCLPPFPADAFMVPQYGYLTLNNGSQAVGRSSFYCLEYFPSQMLRTGNNFQFSYTFEDVPFHGSYAHSQSLDRLMNPLIDQYLYYLNRTQGTTSGTTNQSRLLFSQAGPQSMSLQARNWLPGPCYRQQRLSKTANDNNNSNFPWTAASKYHLNGRDSLVNPGPAMASHKDDEEKFFPMHGNLIFGKEGTTASNAELDNVMITDEEEIRTTNPVATEQYGTVANNLQSSNTAPTTRTVNDQGALPGMVWQDRDVYLQGPIWAKIPHTDGHFHPSPLMGGFGLKHPPPQIMIKNTPVPANPPTTFSPAKFASFITQYSTGQVSVEIEWELQKENSKRWNPEIQYTSNYNKSVNVDFTVDTNGVYSEPRPIGTRYLTRNS

SEQ ID NO: 831 - protein, 736 aa, Artificial Sequence
  Description of Artificial Sequence: Synthetic polypeptide
MAADGYLPDWLEDNLSEGIREWWALKPGVPQPKANQQHQDNRRGLVLPGYKYLGPGNGLDKGEPVNEADAAALEHDKAYDQQLKAGDNPYLKYNHADAEFQERLQEDTSFGGNLGRAVFQAKKRILEPLGLVEGAAKTAPGKKRPVDQSPQEPDSSSGVGKSGKQLARKRLNFGQTGDSESVPDPQPLGEPPAAPTSLGSNTMASGGGAPMADNNEGADGVGNSSGNWHCDSQWLGDRVITTSTRTWALPTYNSHLYKQISGQSGASNDNHYFGYSTPWGYFDFNRFHCHFSPRDWQRLINNNWGFRPKKLSFKLFNIQVKEVTQNDGTTTIANNLTSTVQVFTDSEYQLPYVLGSAHQGCLPPFPADVFMVPQYGYLTLNNGSQAVGRSSFYCLEYFPSQMLRTGNNFQFSYTFEDVPFHSSYAHSQSLDRLMNPLIDQYLYYLNRTQGTTSGTTNQSRLLFSQAGPQSMSLQARNWLPGPCYRQQRLSKTANDNNNSNFPWTAASKYHLNGRDSLVNPGPAMASHKDDEEKFFPMHGNLIFGKEGTTASNAELDNVMITDEEEIRTTNPVATEQYGTVANNLQSSNTAPTTRTVNDQGALPGMVWQDRDVYLQGPIWAKIPHTDGHFHPSPLMGGFGLKHPPPQIMIKNTPVPANPPTTFSPAKFASFITQYSTGQVSVEIEWELQKENSKRWNPEIQYTSNYNKSVNVDFTVDTNGVYSEPRPIGTRYLTRNL

SEQ ID NO: 832 - protein, 736 aa, Artificial Sequence
  Description of Artificial Sequence: Synthetic polypeptide
MAADGYLPDWLEDNLSEGIREWWALKPGVPQPKANQQHQDDRRGLVLPGYKYLGPGNGLDKGEPVNEADAAALEHDKAYDQQLKAGDNPCLKYNHADAEFQERLQEDTSFGGNLGRAVFQAKKRILEPLGLVEEAAKTAPGKKRPVDQSPQEPDSSSGVGKSGKQPARKRLNFGQTGDSESVPDPQPLGEPPAAPTSLGSNTMASGGSAPMADNNEGADGVGNSSGNWHCDSQWLGDRVITTSTRTWALPTYNNHLYKQISSQSGASNDNHYFGYSTPWGYFDFNRFHCHFSPRDWQRLINNNWGFRPKKLSFKLFNIQVKEVTQNDGTTTIANNLTSTVQVFTDSEYQLPYVLGSAHQGCLPPFPADVFMVPQYGYLTLNNGSQAVGRSSFYCLEYFPSQMLRTGNNFQFSYTFEDVPFHSSYAHSQSLDRLMDPLIDQYLYYLNRTQGTTSGTTNQSRLLFSQAGPQSMSLQARNWLPGPCYRQQRLSKTANDNNNSNFPWTAASKYHLNGRDSLVNPGPAMASHKDDEEKFFPMHGNLIFGKEGTTASNAELDNVMITDEEEIRTTNPVATEQYGTVANNLQSSNTAPTTRTVNDQGALPGMVWQDRDVYLQGPIWAKIPHTDGHFHPSPLMGGFGLKHPPPQIMIKNTPVPANPPTTFSPAKFASFITQYSTGQVSVEIEWELQKENSKRWNPEIQYTSNYNKSVNVDFTVDTNGVYSEPRPIGTRYLTRNL

SEQ ID NO: 833 - protein, 736 aa, Artificial Sequence
  Description of Artificial Sequence: Synthetic polypeptide
MAADGYLPDWLEDNLSEGIREWWALKPGVPQPKANQQHQDDRRGLVLPGYKYLGPGNGLDKGEPVNEADAAALEHDKAYDQQLKAGDNPYLKYNHADAEFQERLQEDTSFGGNLGRAVFQAKKRILEPLGLVEEAAKTAPGKKRPVDQSPQEPDSSSGVGKSGKQPARKRLNFGQTGDSESVPDPQPLGEPPAAPTSLGSNTMASGGGAPMADNNEGADGVGNSSGNWHCDSQWLGNRVITTSTRTWALPTYNNHLYKQISSQSGASNDNHYFGYSTPWGYFDFNRFHCHFSPRDWQRLINNNWGFRPKKLSFKLFNIQVKEVTQNDGTTTIANNLTSTVQVFTDSEYQLPYVLGSAHQGCLPPFPADVFMVPQYGYLTLNNGSQAVGRSSFYCLEYFPSQMLRTGNNFQFSYTFEDVPFHSSYAHSQSLDRLMNPLIDQYLYYLNRTQGTTSGTTNQSRLLFSQAGPQSMSLQARNWLPGPCYRQQRLSKTANDNNNSNFPWTAASKYHLNGRDSLVNPGPAMASHKDDEEKFFPMHGNLIFGKEGTTASNAELDNVMITDEEEIRTTNPVATEQYGTVANNLQSSNTAPTTRTVNDQGALPGMVWQDRDVYLQGPIWAKIPHTDGHFHPSPLMGGFGLKHPPPQIMIKNTPVPANPPTTFSPAKFASFITQYSTGQVSVEIEWELQKENSKRWNPEIQYTSNYNKSVNVDFTVDTNGVYSEPRPIGTRYLTRNL

SEQ ID NO: 834 - protein, 736 aa, Artificial Sequence
  Description of Artificial Sequence: Synthetic polypeptide
MAADGYLPDWLEDNLSEGIREWWALKPGVPQPKANQQHQDDRRGLVLPGYKYLGPGNGLDKGEPVNEADAAALEHDKAYDQQLKAGDNPYLKYNHADAEFQERLQEDTSFGGNLGRAVFQAKKRILEPLGLVEEAAKTAPGKKRPVDQSPQEPDSSSGVGKSGKQPARKRLNFGQTGDSESVPDPQPLGEPPAAPTSLGSNTMASGGGAPMADNNEGADGVGNSSGNWHCDSQWLGDRVITTSTRTWALPTYNNHLYKQISSQSGASNDNHYFGYSTPWGYFDFNRFHCHFSPRDWQRLINNNWGFRPKKLSFKLFNIQVKEVTQNDGTTTIANNLTSTVQVFTDSEYQLPYVLGSAHQGCLPPFPADVFMVPQYGYLTLNNGSQAVGRSSFYCLEYFPSQMLRTGNNFQFSYTFEDVPFHSSYAHSQSLDRLMNPLIDQYLYYLNRTQGTTSGTTNQSRLLFSQAGPQSMSLQARNWLPGPCYRQQRLSKTANDNNNSNFPWTAASKYHLNGRDSLVNPGPAMASHKDDEEKFFPMHGNLIFGKEGTTASNAELDNVMITDEEEIRTTNPVATVQYGTVANNLQSSNTAPTTRTVNDQGALPGMVWQDRDVYLQGPIWAKIPHTDGHFHPSPLMGGFGLKHPPPQIMIKNTPVPANPPTTFSPAKFASFITQYSTGQVSVEIEWELQKENSKRWNPEIQYTSNYNKSVNVDFTVDTNGVYSEPRPIGTRYLTRNL

SEQ ID NO: 835 - protein, 735 aa, Artificial Sequence
  Description of Artificial Sequence: Synthetic polypeptide
MAADGYLPDWLEDNLSEGIREWWALKPGVPQPKANQQHQDNRRGLVLPGYKYLGPGNGLDKGEPVNEADAAALEHDKAYDQQLKAGDNPYLKYNHADAEFQERLQEDTSFGGNLGRAVFQAKKGILEPLGLVEEAAKTAPGKKRPVDQSPQEPDSSSGVGKSGKQPARKRLNFGQTGDSESVPDPQPLGEPPAAPTSLGSNTMASGGGAPMADNNEGADGVGNSSGNWHCDSQWLGDRVITTSTRTWALPTYNNHLYKQISSQSGASNDNHYFGYSTPWGYFDFNRFHCHFSPRDWQRLINNNWGFRPKKLSFKLFNIQVKEVTQNDGTTTIANNLTSTVQVFTDSEYQLPYVFGSAHQGCLPPFPADVFMVPQYGYLTLNNGSQAVGRSSFYCLEYFPSQMLRTGNNFQFSYTFEDVPFHSSYAHSQSSDRLMNPLIDQYLYYLNRTQGTTSGTTNQSRLLFSQAGPQSMSLQARNWLPGPCYRQQRLSKTANDNNNSNFPTAASKYHLNGRDSLVNPGPAMASHKDDEEKFFPMHGNLIFGKEGTTASNAELDNVMITDEEEIRTTNPVATEQYGTVANNLQSSNTAPTTRTVNDQGALPGMVWQDRDVYLQGPIWAKIPHTDGHFHPSPLMGGFGLKHPPPQIMIKNTPVPANPPTTFSPAKFASFITQYSTGQVSVEIEWELQKENSKRWNPEIQYTSNYNKSVNVDFTVDTNGVYSEPRPIGTRYLTRNL

SEQ ID NO: 836 - protein, 736 aa, Artificial Sequence
  Description of Artificial Sequence: Synthetic polypeptide
MAADGYLPDWLEDNLSEGIREWWALKPGVPQPKANQQHQDNRRGLVLPGYKYLGPGNGLDEGEPVNEADAAALEHDKAYDQQLKAGDNPYLKYNHADAEFQERLQEDTSFGGNLGRAVFQAKKRILEPLGLVEGAAKTAPGKKRPVDQSPQEPDSSSGVGKSGKQPARKRLNFGQTGDSESVPDPQPLGEPPAAPTSLGSNTMASGGGAPMADNNEGADGVGNSSGNWHCDSQWLGDRVITTSTRTWALPTYNSHLYKQISSQSGASNDNHYFGYSTPWGYFDFNRFHCHFSPRDWQRLINNNWGFRPKKLSFKLFNIQVKEVTQNDGTTTIANNLTSTVQVFTDSEYQLPYVLGSAHQGCLPPFPADVFMVPQYGYLTLNNGSQAVGRSSFYCLEYFPSQMLRTGNNFQFSYTFEDVPFHSSYAHSQSLDRLMNPLIDQYLYYLNRTQGTTSGTTNQSRLLFSQAGPQSMSLQARNWLPGPCYRQQRLSKTANDNNNSNFPWTAASKYHLNGRDSLVNPGPAMASHKDDEEKFFPMHGNLIFGKEGTTASNAELDNVMITDEEEIRTTNPVATEQYGTVANNLQSSNTAPTTRTVNDQGALPGMVWQDRDVYLQGPIWAKIPHTDGHFHPSPLMGGFGLKHPPPQIMIKNTPVPANPPTTFSPAKFASFITQYSTGQVSVEIEWELQKENSKRWNPEIQYTSNYNKSVNVDFTVDTNGVYSEPRPIGTRYLTRNL

SEQ ID NO: 837 - protein, 668 aa, Artificial Sequence
  Description of Artificial Sequence: Synthetic polypeptide
MAADGYLPDWLEDNLSEGIREWWALKPGVPQPKANQQHQDNRRGLVLPGYKYLGPGNGLDKGEPVNEADAAALEHDKAYDQQLKAGDNPYLKYNHADAEFQERLQEDTSFGGNLGRAVFQAKKRILEPLGLVEGAAKTAPGKKRPVDQSPQEPDSSSGVGKSGKQPARKRLNFGQTGDSESVPDPQPLGEPPAAPTSLGSNTMASGGGAPMADNNEGADGVGNSSGNWHCDSQWLGDRVITTSTRTWALPTYNSHLYKQISSQSGASNDNHYFGYSTPWGILTLTDSTATSHHVTGSDSLTTTGDSGPRNSASSSSTSKLKRSRRTMARRLLPITLPARFKCLRTRSISSRTCSGRRTKAVSRRFQRTPSWSLSMDTSPTTEVKRWDAHPFTAWSTSLRRCGLEITSNSAIPSRMYLFTAATLTARVWIAILLLISICTTTERKEQPLEQPTNHGCFLARLGLSLCLCRPEIGYLGPATGNRDFQRLLTTTTTVTFLGQRPANIISMAATRWIQDQLWPVTRTMKKNFSLCTAIRGPYLAWCGKIVTCTFKDLSGQRFLTRMDTFILLLWEALDNIRLLKSSKILRYRQILRRLSARPSLLHLSLSTPLDRSAWKLSGSYRKKTANVGIQRFSTLPTTTSLLMWTLLTLMVFIVNLALLEPGISHETC

SEQ ID NO: 838 - protein, 734 aa, Artificial Sequence
  Description of Artificial Sequence: Synthetic polypeptide
MTDGYLPDWLEDNLSEGVREWWALQPGAPKPKANQQHQDNARGLVLPGYKYLGPGNGLDKGEPVNAADAAALEHDKAYDQQLKAGDNPYLKYNHADAEFQQRLQGDTSFGGNLGRAVFQAKKRVLEPLGLVEQAGETAPGKKRPLIESPQQPDSSTGIGKKGKQPAKKKLVFEDETGAGDGPPEGSTSGAMSDDSEMRAATGGAAVEGGQGADGVGNASGDWHCDSTWSEGHVTTTSTRTWVLPTYNNHLYKRLGESLQSNTYNGFSTPWGYFDFNRFHCHFSPRDWQRLINNNWGMRPKAMRVKIFNIQVKEVTTSNGETTVANNLTSTVQIFADSSYELPYVMDAGQEGSLPPFPNDVFMVPQYGYCGLVTGNTSQQQTDRNAFYCLEYFPSQMLRTGNNFEITYSFEKVPFHSMYAHSQSLDRLMNPLIDQYLWGLQSTTTGTTLNAGTATTNFTKLRPTNLSNFKKNWLPGPSIKQQGFSKTANQNYKIPATGSDSLIKYETHSTLDGRWSALTPGPPMATAGPADSKFSNSQLIFAGPKQNGNTATVPGTLIFTSEEELAATNATDTDMWGNLPGGDQSNSNLPTVDRLTALGAVPGMVWQNRDIYYQGPIWAKIPHTDGHFHPSPLIGGFGLKHPPPQIFIKNTPVPANPATTFSSTPVNSFITQYSTGQVSVQIDWEIQKERSKRWNPEVQFTSNYGQQNSLLWAPDAAGKYTEPRAIGTRYLTHHL

SEQ ID NO: 839 - protein, 734 aa, Artificial Sequence
  Description of Artificial Sequence: Synthetic polypeptide
MTDGYLPDWLEDNLSEGVREWWALQPGAPKPKANQQHQDNARGLVLPGYKYLGPGNGLDKGEPVNAADAAALEHDKAYDQQLKAGDNPYLKYNHADAEFQQRLQGDTSFGGNLGRAVFQAKKRVLEPLGLVEQAGETAPGKKRPLIESPQQPDSSTGIGKKGKQPAKKKLVFEDETGAGDGPPEGSTSGAMSDDSEMRAAAGGAAVEGGQGADGVGNASGDWHCDSTWSEGHVTTTSTRTWVLPTYNNHLYKRLGESLQSNTYNGFSTPWGYFDFNRFHCHFLPRDWQRLINNNWGVRPKAMRVKIFNIQVKEVTTSNGETTVANNLTSTVQIFADSSYELPYVMDAGQEGSLPPFPNDVFMVPQYGYCGLVTGDTSQQQTDRNAFYCLEYFPSQMLRTGNNFEITYSFEKVPFHSMYAHSQSLDRLMNPLIDQYLWGLQSTTTGTTLNAGTATTNFTKLRPTNFSNFKKNWLPGPSIKQQGFSKTANQNYKIPATGSDSLIKYETHSTLDGRWSALTPGPPMATAGPADSKFSNSQLIFAGPKQNGNTATVPGTLIFTSEEELAATNATDTDMWGNLPGGDQSNSNLPTVDRLTALGAVPGMVWQNRDIYYQGPIWAKIPHTDGHFHPSPLIGGFGLKHPPPQIFIKNTPVPANPATTFSSTPVNSFITQYSTGQVSVQIDWEIQKERSKRWNPEVQFTSNYGQQNSLLWAPDAAGKYTEPRAIGTRYLTHHL

SEQ ID NO: 840 - protein, 734 aa, Artificial Sequence
  Description of Artificial Sequence: Synthetic polypeptide
MTDGYLPDWLEDNLSEGVREWWALQPGAPKPKANQQHQDNARGLVLPGYKYLGPGNGLDEGEPVNAADAAALEHDKAYDQQLKAGDNPYLKYNHADAEFQQRLQGDTSFGGNLGRAVFQAKKRVLEPLGLVEQAGETAPGKKRPLIESPQQPDSSTGIGKKGKQPAKKKLVFEDETGAGDGPPEGSTSGAMSDDSEMRAAAGGAAVEGGQGADGVGNASGDWHCDSTWSEGHVTTTSTRTWVLPTYNNHLYKRLGESLQSNTYNGFSTPWGYFDFNRFHCHFSPRDWQRLINNNWGMRPKAMRVKIFNIQVKEVTTSNGETTVANNLTSTVQIFADSSYELPYVMDAGQEGSLPPFPNDVFMVPQYGYCGLVTGNTSQQQTDRNAFYCLEYFPSQMLRTGNNFEITYSFEKVPFHSMYAHSQSLDRLMNPLIDQYLWGLQSTTTGTTLNAGTATTNFTKLRPTNFSNFKKNWLPGPSIKQQGFSKTANQNYKIPATGSDSLIKYETHSTLDGRWSALTPGPPMATAGPADSKFSNSQLIFAGPKQNGNTATVPGTLIFTSEEELAATNATDTDMWGNLPGGDQSNSNLPTVDRLTALGAVPGMVWQNRDIYYQGPIWAKIPHTDGHFHPSPLIGGFGLKHPPPQIFIKNTPVPANPATTFSSTPVNSFITQYSTGQVSVQIDWEIQKERSKRWNPEVQFTSNYGQQNSLLWAPDAAGKYTEPRAIGTRYLTHHL

SEQ ID NO: 841 - protein, 734 aa, Artificial Sequence
  Description of Artificial Sequence: Synthetic polypeptide
MTDGYLPDWLEDNLSEGVREWWALQPGAPKPKANQQHQDNARGLVLPGYKYLGPGNGLDKGEPVNAADAAALEHDKAYDQQLKAGDNPYLKYNHADAEFQQRLQGDTSFGGNLGRAVFQAKKRVLEPLGLVEQAGETAPGKKRPLIESPQQPDSSTGIGKKGKQPAKKKLVFEDGTGAGDGPPEGSTSGAMSDDSEMRAAAGGAAVEGGQGADGVGNASGDWHCDSTWSEGHVTTTSTRTWVLPTYNNHLYKRLGESLQSNTYNGFPTPWGYFDFNRFHCHFSPRDWQRLINNNWGMRPKAMRVKIFNIQVKEVTTSNGETTAANNLTSTVQIFADSSYELPYVMDAGQEGSLPPFPNDVFMVPQYGYCGLVTGNTSQQQTDRNAFYCLEYFPSQMLRTGNNFEITYSFEKVPFHSMYAHSQSLDRLMNPLIDQYLWGLQSTTTGTTLNAGTATTNFTKLRPTNFSNFKKNWLPGPSIKQQGFSKTANQNYKIPATGSDSLIKYETHSTLDGRWSALTPGPPMATAGPADSKFSNSQLIFAGPKQNGNTATVPGTLIFTSEEELAATNATDTDMWGNLPGGDQSNSNLPTVDRLTALGAVPGMVWQNRDIYYQGPIWAKIPHTDGHFHPSPLIGGFGLKHPPPQIFIKNTPVPANPATTFSSTPVNSFITQYSTGQVSVQIDWEIQKERSKRWNPEVQFTSNYGQQNSLLWAPDAAGKYTEPRAIGTRYLTHHL

SEQ ID NO: 842 - protein, 734 aa, Artificial Sequence
  Description of Artificial Sequence: Synthetic polypeptide
MTDGYLPDWLEDNLSEGVREWWALQPGAPKPKANQQHQDNARGLVLPGYKYLGPGNGLDKGEPVNAADAAALEHDKAYDQQLKAGDNPYLKYNHADAEFQQRLQGDTSFGGNLGRAVFQAKKRVLEPLGLVEQAGETAPGKKRPLIESPQQPDSSTGIGKKGKQPAKKKLVFEDETGAGDGPPEGSTSGAMSDDSEMRAAAGGAAVEGGQGADGVGNASGDWHCDSTWSEGHVTTTSTRTWVLPTYNNHLYKRLGESLQSNTYNGFSTPWGYFDFNRFHCHFSPRDWQRLINNNWGMRPKAMRVKIFNIQVKEVTTSNGETTVANNLTSTVQIFADSSYELPYVMDAGQEGSLPPFPNDVFMVPQYGYRGLVTGNTSQQQTDRNAFYCLEYFPSQMLRTGNNFEITYSFEKVPFHSMYAHSQSLDRLMNPLIDQYLWGLQSTTTGTTLNAGTATTNFTKLRPTNFSNFKKNWLPGPSIKQQGFSKTANQNYKIPATGSDSLIKYETHSTLDGRWSALTPGPPMATAGPADSKFSNSQLIFAGPKQNGNTATVPGTLIFTSEEELAATNATDTDMWGNLPGGDQSNSNLPTVDRLTALGAVPGMVWQNRDIYYQGPIWAKIPHTDGHFHPSPLIGGFGLKHPPPQIFIKNTPVPANPATTFSSTPVNSFITQYSTGQVSVQIDWEIQKERSKRWNPEVQFTSNYGQQNSLLWAPDAAGKYTEPRAIGTRYLTHHL

SEQ ID NO: 843 - protein, 734 aa, Artificial Sequence
  Description of Artificial Sequence: Synthetic polypeptide
MTDGYLPDWLEDNLSEGVREWWALQPGAPKPKANQQHQDNARGLVLQGYKYLGPGNGLDKGEPVNAADAAALEHDKAYDQQLKAGDNPYLKYNHADAEFQQRLQGDTSFGGNLGRAVFQAKKRVLEPLGLVEQAGETAPGKKRPLIESPQQPDSSTGIGKKGKQPAKKKLVFEDETGAGDGPPEGSTSGAMSDDSEMRAAAGGAAVEGGQGADGVGNASGDWHCDSTRSEGHVTTTSTRTWVLPTYNNHLYKRLGESLQSNTYNGFSTPWGYFDFNRFHCHFSPRDWQRLINNNWGMRPKAMRVKIFNIQVKEVTTSNGETTVANNLTSTVQIFADSSYELPYVMDAGQEGSLPPFPNDVFMVPQYGYCGLVTGNTSQQQTDRNAFYCLEYFPSQMLRTGNNFEITYSFEKVPFHSMYAHSQSLDRLMNPLIDQYLWGLQSTTTGTTLNAGTATTNFTKLRPTNFSNFKKNWLPGPSIKQQGFSKTANQNYKIPATGSDSLIKYETHSTLDGRWSARTPGPPMATAGPADSKFSNSQLIFAGPKQNGNTATVPGTLIFTSEEELAATNATDTDMWGNLPGGDQSNSNLPTVDRLTALGAVPGMVWQNRDIYYQGPIWAKIPHTDGHFHPSPLIGGFGLKHPPPQIFIKNTPVPANPATTFSSTPVNSFITQYSTGQVSVQIDWEIQKERSKRWNPEVQFTSNYGQQNSLLWAPDAAGKYTEPRAIGTRYLTHHL

SEQ ID NO: 844 - protein, 724 aa, Artificial Sequence
  Description of Artificial Sequence: Synthetic polypeptide
MSFVDHPPDWLEEVGEGLREFLGLEAGPPKPKPNQQHQDQARGLVLPGYNYLGPGNGLDRGEPVNRADEVAREHDISYNEQLEAGDNPYLKYNHADAEFQERLADDTSFGGNLGKAVFQAKKRVLEPFGLVEEGAKTAPTGKRIDDHFPKRKKARTEEDSKPSTSSDAEAGPSGSQQLQIPAQPASSLGADTMSAGGGGPLGDNNQGADGVGNASGDWHCDSTWMGDRVVTKSTRTWVLPSYNNHQYREIKSGSVDGSNANAYFGYSTPWGYFDFNRFHSHWSPRDWQRLINNYWGFRPRSLRVKIFNIQVKEVTVQDSTTTIANNLTSTVQVFTDDDYQLPYVVGNGTEGCLPAFPPQVFTLPQYGYATLNRDNTENPTERSSFFCLEYFPSKMLRTGNNFEFTYNFEEVPFHSSFAPSQNLFKLANPLVDQYLYRFVSTNNTGGVQFNKNLAGRYANTYKNWFPGPMGRTQGWNLGSGVNRASVSAFATTNRMELEGASYQVPPQPNGMTNNLQGSNTYALENTMIFNSQPANPGTTATYLEGNMLITSESETQPVNRVAYNVGGQMATNNQSSTTAPATGTYNLQEIVPGSVWMERDVYLQGPIWAKIPETEAHFHPSPAMGGFGLKHPPPMMLIKNTPVPGNITSFSDVPVSSFITQYSTGQVTVEMEWELKKENSKRWNPEIQYTNNYNDPQFVDFAPDSTGEYRTTRPIGTRYLTRPL

SEQ ID NO: 845 - protein, 724 aa, Artificial Sequence
  Description of Artificial Sequence: Synthetic polypeptide
MSFVDHPPDWLEEVGEGLREFLGLEAGPPKPKPNQQHQDQARGLVLPGYNYLGPGNGLDRGEPVNRADEVAREHDISYNEQLEAGDNPYLKYNHADAEFQEKLADDTSSGGNLGKAVFQAKKRVLEPFGLVEEGAKTAPTGKRIDDHFPKRKKARTEEDSKPSTSSDAEAGPSGSQQLQIPAQPASSLGADTMSAGGGGPLGDNNQGADGVGNASGDWHCDSTWMGDRVVTKSTRTWVLPSYNNHQYREIKSGSVDGSNANAYFGYSTPWGYFDFNRFHSHWSPRDWQRLINNYWGFRPRSLRVKIFNIQVKEVTVQDSTTTIANNLTSTVQVFTDDDYQLPYVVGNGTEGCLPAFPPQVFTLPQYGYATLNRDNTENPTERSSFFCLEYFPSKMLRTGNNFEFTYNFEEVPFHSSFAPSQNLFKLANPLVDQYLYRFVSTNNTGGVQFNKNLAGRYANTYKNWFPGPMGRTQGWNLGSGVNRASVSAFATTNRMELEGASYQVPPQPNGMTNNLQGSNTYALENTMIFNSQPANPGTTATYLEGNMLITSESETQPVNRVAYNVGGQMATNNQSSTTAPATGTYNLQEIVPGSVWMERDVYLQGPIWAKIPETGAHFHPSPAMGGFGLKHPPPMMLIKNTPVPGNITSFSDVPVSSFITQYSTGQVTVEMEWELKKENSKRWNPEIQYTNNYNDPQFVDFAPDSTGEYRTTRPIGTRYLTRPL

SEQ ID NO: 846 - protein, 724 aa, Artificial Sequence
  Description of Artificial Sequence: Synthetic polypeptide
MSFVDHPPDWLEEVGEGLREFLGLEAGPPKPKPNQQHQDQARGLVLPGYNYLGPGNGLDRGEPVNRADEVAREHDISYNEQLEAGDNPYLKYNHADAEFQEKLADDTSFGGNLGKAVFQAKKRVLEPFGLVEEGAKTAPTGKRIDDHFPKRKKARTEEDSKPSTSSDAEAGPSGSQQLQIPAQPASSLGADTMSAGGGGPLGDNNQGADGVGNASGDWHCDSTWMGDRVVTKSTRTWVLPSYNNHQYREIKSGSVDGSNANAYFGYSTPWGYFDFNRFHSHWSPRDWQRLINNYWGFRPRSLRVKIFNIQVKEVTVQDSTTTIANNLTSTVQVFTDDDYQLPYVVGNGTEGCLPAFPPQVFTLPQYGYATLNRDNTENPTERSSFFCLEYFPSKMLRTGNNFEFTYNFEEVPFHSSFAPSQNLFKLANPLVDQYLYRFVSTNNTGGVQFNKNLAGRYANTYKNWFPGPMGRTQGWNLGSGVNRASVSAFATTNRMELEGASYQVPPQPNGMTNNLQGSNTYALENTMIFNSQPANPGTTATYLEGNMLITSESETQPVNRVAYNVGGQMATNNQSSTTAPATGTYNLQEIVPGSVWMERDVYLQGPIWAKIPETGAHFHPSPAMGGFGLKHPPPMMLIKSTPVPGNITSFSDVPVSSFITQYSTGQVTVEMEWELKKENSKRWNPEIQYTNNYNDPQFVDFAPDSTGEYRTTRPIGTRYLTRPL

SEQ ID NO: 847 - protein, 724 aa, Artificial Sequence
  Description of Artificial Sequence: Synthetic polypeptide
MSFVDHPPDWLEEVGEGLREFLGPEAGPPKPKPNQQHQDQARGLVLPGYNYLGPGNGLDRGEPVNRADEVAREHDISYNEQLEAGDNPYLKYNHADAEFQEKLADDTSFGGNLGKAVFQAKKRVLEPFGLVEEGAKTAPTGKRIDDHFPKRKKVRTEEDSKPSTSSDAEAGPSGSQQLQIPAQPASSLGADTMSAGGGGPLGDNNQGADGVGNASGDWHCDSTWMGDRVVTKSTRTWVPPSYNNHQYREIKSGSVDGSNANAYFGYSTPWGYFDFNRFHSHWSPRDWQRLINNYWGFRPRSLRVKIFNIQVKEVTVQDSTTTIANNLTSTVQVFTDDDYQLPYVVGNGTEGCLPAFPPQVFTLPQYGYATLNRDNTENPTERSSFFCLEYFPSKMLRTGNNFEFTYNFEEVPFHSSFAPSQNLFKLANPLVDQYLYRFVSTNNTGGVQFNKNLAGRYANTYKNWFPGPMGRTQGWNLGSGVNRASVSAFATTNRMELEGASYQVPPQPNGMTNNLQGSNTYALENTMIFNSQPANPGTTATYLEGNMLITSESETQPVNRVACNVGGQMATNNQSSTTAPATGTYNLQEIVPGSVWMERDVYLQGPIWAKIPETGAHFHPSPAMGGFGLKHPPPMMLIKNTPVPGNITSFSDVPVSSFITQYSTGQVTVEMEWELKKENSKRWNPEIQYTNNYNDPQFVDFAPDSTGEYRTTRPIGTRYLTRPL

SEQ ID NO: 848 - protein, 724 aa, Artificial Sequence
  Description of Artificial Sequence: Synthetic polypeptide
MSFVDHPPDWLEEVGEGLREFLGLEAGPPKPKPNQQHQDQARGLVLPGYNYLGPGNGLDRGEPVNRADEVAREHDISYNEQLEAGDNPYLKYNHADAEFQEKLADDTSFGGNLGKAVFQAKKRVLEPFGLVEEGAKTAPTGKRIDDHFPKRKKARTEEDSKPSTSSDAEAGPSGSQQLQIPAQPASSLGADTMSAGGGGPLGDNNQGADGVGNASGDWHCDSTWMGDRVVTKSTRTWVLPSYNNHQYREIKSGSVDGSNANAYFGYSTPWGYFDFNRFHSHWSPRDWQRLINNYWGFRPRSLRVKIFNIQVKEVTVQDSTTTIANNLTSTVQVFTDDDYQLPYVVGNGTEGCLPAFPPQVFTLPQYGYATLNRDNTENPTERSSFFCLEYFPSKMLRTGNNFEFTYNFEEVPFHSSFAPSQNLFKLANPLVDQYLYRFVSTNNTGGVQFNKNLAGRYANTYKNWFPGPMGRTQGWNLGSGVNRASVSAFATTNRMELEGASYQVPPQPNGMTNNLQGSNTYALENTMIFNSQPANPGTTATYLEGNMLITSESETQPVNRVAYNVGGQMATNNQSSTTAPATGAYNLQEIVPGSVWMERDVYLQGPIWAKIPETGAHFHPSPAMGGFGLKHPPPMMLIKNTPVPGNITSFSDVPVSSFITQYSTGQVTVEMEWELKKENSKRWNPEIQYTNNYNDPQFVDFAPDSTGEYRTTRPIGTRYLTRPL

SEQ ID NO: 849 - protein, 724 aa, Artificial Sequence
  Description of Artificial Sequence: Synthetic polypeptide
MSFVDHPPDWLEEVGEGLREFLGLEAGPPKPKPNQQHQDQARGLVLPGYNYLGPGNGLDRGEPVNRADGVAREHDISYNEQLEAGDNPYLKYNHADAEFQEKLADDTSFGGNLGKAVFQAKKRVLEPFGLVEEGAKTAPTGKRIDDHFPKRKKARTEEDSKPSTSSDAEAGPSGSQQLQIPAQPASSLGADTMSAGGGGPLGDNNQGADGVGNASGDWHCDSTWMGDRVVTKSTRTWVLPSYNNHQYREIKSGSVDGSNANAYFGYSTPWGYFDFNRFHSHWSPRDWQRLINNYWGFRPRSLRVKIFNIQVKEVTVQDSTTTIANNLTSTVQAFTDDDYQLPYVVGNGTEGCLPAFPPQVFTLPQYGYATLNRDNTENPTERSSFFCLEYFPSKMLRTGNNFEFTYNFEEVPFHSSFAPSQNLFKLANPLVDQYLYRFVSTNNTGGVQFNKNLAGRYANTYKNWFPGPMGRTQGWNLGSGVNRASVSAFATTNRMELEGASYQVPPQPNGMTNNLQGSNTYALENTMIFNSQPANPGTTATYLEGNMLITSESETQPVNRVAYNVGGQMATNNQSSTTAPATGTYNLQEIVPGSVWMERDVYLQGPIWAKIPETGAHFHPSPAMGGFGLKHPPPMMLIKNTPVPGNITSFSDVPVSSFITQYSTGQVTVEMEWELKKENSKRWNPEIQYTNNYNDPQFVDFAPDSTGEYRTTRPIGTRYLTRPL

SEQ ID NO: 850 - protein, 723 aa, Artificial Sequence
  Description of Artificial Sequence: Synthetic polypeptide
MSFVDHPPDWLEEVGEGLREFLGLEAGPPKPKPNQQHQDQARGLVLPGYNYLGPGNGLDRGEPVNRADEVAREHDISYNEQLEAGDNPYLKYNHADAEFQEKLADDTSFGGNLGKAVFQAKKRVLEPFGLVEEGAKTAPTGKRIDDHFPKRKKARTEEDSKPSTSSDAEAGPSGSQQLQIPAQPASSLGADTMSAGGGGPLGDNNQGADGVGNASGDWHCDSTWMGDRVVTKSTRTWVLPSYNNHQYREIKSGSVDGSNANAYFGYSTPWGYFDFNRFHSHWSPRDWQRLINNYWGFRPRSLRVKIFNIQVKEVTVQDSTTTIANNLTSTVQVFTDDDYQLPYVVGNGTEGCLPAFPPQVFTLPQYGYATLNRDNTENPTERSSFFCLEYFPSKMLRTGNNFEFTYNFEEVPFHSSFAPSQNLFKLANPLVDQYLYRFVSTNNTGGVQFNKNLAGRYANTYKNWFPGPMGRTQGWNLGSGVNRASVSAFATTNRMELEGASYVPPQPNGMTNNLQGSNTYALENTMIFNSQPANPGTTATYLEGNMLITSESETQPVNRVAYNVGGQMATNNQSSTTAPATGTYNLQEIVPGSVWMEGDVYLQGPIWAKIPETGAHFHPSPAMGGFGLKHPPPMMLIKNTPVPGNITSFSDVPVSSFITQYSTGQVTVEMEWELKKENSKRWNPEIQYTNNYNDPQFVDFAPDSTGEYRTTRPIGTRYLTRPL

SEQ ID NO: 851 - protein, 724 aa, Artificial Sequence
  Description of Artificial Sequence: Synthetic polypeptide
MSFVDHPPDWLEEVGEGLREFLGLEAGPPKPKPNQQHQDQARGLVLPGYNYLGPGNGLDRGEPVNRADEVAREHDISYNEQLEAGDNPYLKYNHADAEFQEKLADDTSFGGNLGKAVFQAKKRVLEPFGLVEEGAKTAPTGKRIDDHFPKRKKVRTEEDSKPSTSSDAEAGPSGSQQLQIPAQPASSLGADTMSAGGGGPLGDNNQGADGVGNASGDWHCDSTWMGDRVVTKSTRTWVLPSYNNHQYREIKSGSVDGSNANAYFGYSTPWGYFDFNRFHSHWSPRDWQRLINNYWGFRPRSLRVKIFNIQVKEVTVQDSTTTIANNLTSTVQVFTDDDYQLPYVVGNGTEGCLPAFPPQVFTLPQYGYATLNRDNTENPTERSSFFCLEYFPSKMLRTGNNFEFTYNFEEVPFHSSFAPSQNLFKLANPLVDQYLYRFVSTNNTGGVQFNKNLAGRYANTYKNWFPGPMGRTQGWNLGSGVNRASVSAFATTNRMELEGASYQVPPQPNGMTNNLQGSNTYALENTMIFNSQPANPGTTATYLEGNMLITSESETQPVNRVAYNVGGQMATNNQSSTTAPATGTYNLQEIVPGSVWMERDVYLQGPIWAKIPETGAHFHPSPAMGGFGLKHPPPMMLIKNTPVPGNITSFSDVPVSSFITQYSTGQVTVEMEWELKKENSERWNPEIQYTNNYNDPQFVDFAPDSTGEYRTTRPIGTRYLTRPL

SEQ ID NO: 852 - protein, 724 aa, Artificial Sequence
  Description of Artificial Sequence: Synthetic polypeptide
MSFVDHPPDWLEEVGEGLREFLGLEAGPPKPKPNQQHQDQARGLVLPGYNYLGPGNGLDRGEPVNRADEVAREHDISYSEQLEAGDNPYLKYNHADAEFQEKLADDTSFGGNLGKAVFQAKKRVLEPFGLVEEGAKTAPTGKRIDDHFPKRKKARTEEDSKPSTSSDAEAGPSGSQQLQIPAQPASSLGADTMSAGGGGPLGDNNQGADGVGNASGDWHCDSTWMGDRVVTKSTRTWVLPSYNNHQYREIKSGSVDGSNANAYFGYSTPWGYFDFNRFHSHWSPRDWQRLINNYWGFRPRSLRVKIFNIQVKEVTVQDSTTTIANNLTSTVQVFTDDDYQLPYVVGNGTEGCLPAFPPQVFTLPQYGYATLNRDNTENPTERSSFFCLEYFPSKMLRTGNNFEFTYNFEEVPFHSSFAPSQNLFKLANPLVDQYLYRFVSTNNTGGVQFNKNLAGRYANTYKNWFPGPMGRTQGWNLGSGVNRASVSAFATTNRMELEGASYQVPPQPNGMTNNLQGSNTYALENTMIFNSQPANPGTTATYLEGNMLITSESETQPVNRVAYNVGGQMATNNQSSTTAPATGTYNLQEIVPGSVWMERDVYLQGPIWAKIPETGAHFHPSPAMGGFGLKHPPPMMLIKNTPVPGNITSFSDVPVSSFITQYSTGQVTVEMEWELKKENSKRWNPEIQYTNNYNDPQFVDFAPDSTGEYRTARPIGTRYLTRPL

SEQ ID NO: 853 - protein, 724 aa, Artificial Sequence
  Description of Artificial Sequence: Synthetic polypeptide
MSFVDHPPDWLEEVGEGLREFLGPEAGPPKPKPNQQHQDQARGLVLPGYNYLGPGNGLDRGEPVNRADEVAREHDISYNEQLEAGDNPYLKYNHADAEFQEKLADDTSFGGNLGKAVFQAKKRVLEPFGLVEEGAKTAPTGKRIDDHFPKRKKARTEEDSKPSTSSDAEAGPSGSQQLQIPAQPASSLGADTMSAGGGGPLGDNNQGADGVGNASGDWHCDSTWMGDRVVTKSTRTWVLPSYNNHQYREIKSGSVDGSNANAYFGYSTPWGYFDFNRFHSHWSPRDWQRLINNYWGFRPRSLRVKIFNIQVKEVTVQDSTTTIANNLTSTVQVFTDDDYQLPYVVGNGTEGCLPAFPPQVFTLPQYGYATLNRDNTENPTERSSFFCLEYFPSKMLRTGNNFEFTYNFEEVPFHSSFAPSQNLFKLANPLVDQYLYRFVSTNNTGGVQFNKNLAGRYANTYKNWFPGPMGRTQGWNLGSGVNRASVSAFATTNRMELEGASYQVPPQPNGMTNNLQGSNTYALENTMIFNSQPANPGTTATYLEGNMLITSESETQPVNRVAYNVGGQMTTNNQSSTTAPATGTYNLQEIVPGSVWMERDVYPQGPIWAKIPETGAHFHPSPAMGGFGLKHPPPMMLIKNTPVPGNITSFSDVPVSSFITQYSTGQVTVEMEWELKKENSKRWNPEIQYTNNYNDPQFVDFAPDSTGEYRTTRPIGTRYLTRPL

SEQ ID NO: 854 - protein, 724 aa, Artificial Sequence
  Description of Artificial Sequence: Synthetic polypeptide
MSFVDHPPDWLEEVGEGLREFLGLEAGPPKPKPNQQHQDQARGLVLPGYNYLGPGNGLDRGEPVNRADEVAREHDISYNEQLEAGDNPYLKYNHADAEFQEKLADDTSFGGNLGKAVFQAKKRVLEPFGLVEEGAKTAPTGKRIDDHFPKRKKARTEEDSKPSTSSDAEAGPSGSQQLQIPAQPASSLGADTMSAGGGGPLGDNNQGADGVGNASGDWHCDSTWMGDRVVTKSTRTWVLPSYNNHQYREIKSGSVDGSNANAYFGYSTPWGYFDFNRFHSHWSPRDWQRLINNYWGFRPRSLRVKIFNIQVKEVTVQDSTTTIANNLTSTVQVFTDDDYQLPYVVGNGTEGCLPAFPPQVFTLPQYGYATLNRDNTENPTERSSFLCLEYFPSKMLRTGNNFEFTYNFEEVPFHSSFAPSQNLFKLANPLVDQYLYRFVSTNNTGGVQFNKNLAGRYANTYKNWFPGPMGRTQGWNLGSGVNRASVSAFATTNRMELEGASYQVPPQPNGMTNNLQGSNTYALENTMIFNSQPANPGTTATYLEGNMLITSESETQPVNRVAYNVGGQMATNNQSSTTAPATGTYNLQEIVPGSVWMKRDVYLQGPIWAKIPETGAHFHPSPAMGGFGLKHPPPMMLIKNTPVPGNITSFSDVPVSSFITQYSTGQVTVEMEWELKKENSKRWNPEIQYTNNYNDPQFVDFAPDSTGEYRTTRPIGTRYLTRPL

SEQ ID NO: 855 - protein, 724 aa, Artificial Sequence
  Description of Artificial Sequence: Synthetic polypeptide
MSFVDHPPDWLEEVGEGLREFLGLEAGPPKPKPNQQHQDQARGLVLPGYNYLGPGNGLDRGEPVNRADEVAREHDISYNEQLEAGDNPYLKYNHADAEFQEKLADDTSFGGNLGKAVFQAKKRVLEPFGLVEEGAKTAPTGKRIDDHFPKRKKARTEEDSKPSTPSDAEAGPSGSQQLQIPAQPASSLGADTMSAGGGGPLGDNNQGADGVGNASGDWHCDSTWMGDRVVTKSTRTWVLPSYNNHQYREIKSGSVDGSNANAYFGYSTPWGYFDFNRFHSHWSPRDWQRLINNYWGFRPRSLRVKIFNIQVKEVTVQDSTTTIANNLTSTVQVFTDDDYQLPYVVGNGTEGCLPAFPPQVFTLPQYGYATLNRDNTENPTERSSFFCLEYFPSKMLRTGNNFEFTYNFEEVPFHSSFAPSQNLFKLANPLVDQYLYRFVSTNNTGGVQFNKNLAGRYANTYKNWFPGPMGRTQGWNLGSGVNRASVSAFATTNRMELEGASYQVPPQPNGMTNNLQGSNTYALENTMIFNSQPANPGTTATYLEGNMLITSESETQPVNRVAYNVGGQMATNNQSSTTAPATGTYNLQEIVPGSVWMERDVYLQGPIWAKIPETGAHFHPSPAMGGFGLKHPPPMMLIKNTPVPGNITSFSDVPVSSFITQYSTGQVTVEMEWELKKENSKRWNPEIQYTNNYNDPQFVDFAPDSTGEYRTTRPIGTRYLTRPL

SEQ ID NO: 856 - protein, 724 aa, Artificial Sequence
  Description of Artificial Sequence: Synthetic polypeptide
MSFVDHPPDWLEEVGEGLREFLGLEAGPPKPKPNQQHQDQARGLVLPGYNYLGPGNGLDRGEPVNRADEVAREHDISYNEQLEAGDNPYLKYNHADAEFQEKLADDTSFGGNLGKAVFQAKKRVLEPFGLVEEGAKTAPTGKRIDDHFPKRKKARTEEDSKPSTSSDAEAGPSGSQQLQIPAQPASSLGADTMSAGGGGPLGDNNQGADGVGNASGDWHCDSTWMGDRVVTKSTRTWVLPSYNNHQYREIKSGSVDGSNANAYFGYSTPWGYFDFNRFHSHWSPRDWQRLINNYWGFRPRSLRVKIFNIQVKEVTVQDSTTTIANNLTSTVQVFTDDDYQLPYVVGNGTEGCLPAFPPQVFTLPQYGYATLNRDNTENPTERSSFFCLEYFPSKMLRTGNNFEFTYNFEEVPFHSSFAPSQNLFKLANPLVDQYLYRFVSTNNTGGVQFNKNLAGRYANTHKNWFPGPMGRTQGWNLGSGVNRASVSAFATTNRMELEGASYQVPPQSNGMTNNLRGSNTYALENTMIFNSQPANPGTTATYLEGNMLITSESETQPVNRVAYNVGGQMATNNQSSTTAPATGTYNLQEIVPGSVWMERDVYLQGPIWAKIPETGAHFHPSPAMGGFGLKHPPPMMLIKNTPVPGNITSFSDVPVSSFITQYSTGQVTVEMEWELKKENSKRWNPEIQYTNNYNDPQFVDFAPDSTGEYRTTRPIGTRYLTRPL

SEQ ID NO: 857 - protein, 724 aa, Artificial Sequence
  Description of Artificial Sequence: Synthetic polypeptide
MSFVDHPPDWLEEVGEGLREFLGLEAGPPKPKPNQQHQDQARGLVLPGYNYLGPGNGLDRGEPVNRADEVAREHDISYNEQLEAGDNPYLKYNHADAEFQEKLADDTSFGGNLGKAVFQAKKRVLEPFGLVEEGAKTAPTGKRIDDHFPKRKKARTEEDSKPSTSSDAEAGPSGSQQLQIPAQPASSLGADTMSAGGGGPLGDNNQGADGVGNASGDWHCDSTWMGDRVVTKSTRTWVLPSYNNHQYREIKSGSVDGSNANAYFGYSTPWGYFDFNRFHSHWSPRDWQRLINNYWGFRPRSLRVKIFNIQVKEVTVQDSTTTIANNLTSTVQVFTDDDYQLPYVVGNGTEGCLPAFPPQVFTLPQYGYATLNRDNTENPTERSSFFCLEYFPSKMLRTGNNFEFTYNFEEVPFHSSFAPSQNLFKLANPLVDQYLYRFVSTNNTGGVQFNKNLAGRYANTYKNWFPGPMGRTQGWNLGSGVNRASVSAFATTNRMELEGASYQVPPQPNGMTNNLQGSNTYALENTMIFNSQPANPGTTATYLEGNMLITSESETQPVNRVAYSVGGQMATNNQSSTTAPTTGTYNLQEIVPGSVWMERDVYLQGPIWAKIPETGAHFHPSPAMGGFRLKHPPPMMLIKNTPVPGNITSFSDVPVSSFITQYSTGQVTVEMEWELKKENSKRWNPEIQYTNNYNDPQFVDFAPDSTGEYRTTRPIGTRYLTRPL

SEQ ID NO: 858 - protein, 724 aa, Artificial Sequence
  Description of Artificial Sequence: Synthetic polypeptide
MSFVDHPPDWLEEVGEGLREFLGLEAGPPKPKPNQQHQDQARGLVLPGYNYLGPGNGLDRGEPVNRADEVAREHDISYNEQLEAGDNPYLKYNHADAEFQEKLADDTSFGGNLGKAVFQAKKRVLEPFGLVEEGAKTAPTGKRIDDHFPKRKKARTEEDSKPSTSSDAEAGPSGSQQLQIPAQPASSLGADTMSAGGGGPLGDNNQGADGVGNASGDWHCDSTWMGDRVVTKSTRTWVLPSYNNHQYREIKSGSVDGSNANAYFGYSTPWGYFDFNRFHSHWSPRDWQRLINNYWGFRPRSLRVKIFNIQVKEVTVQDSTTTIANNLTSTVQVFTDDDYQLPYVVGNGTEGCLPAFPPQVFTLPQYGYATLNRDNTENPTERSSFFCLEYFPSKMLRTGNNFEFTYNFEEVPFHSSFAPSQNLFKLANPLVDQYLYRFVSTNNTGGVQFNKNLAGRYANTYKNWFPGPMGRTQGWNLGSGVNRASVSAFAATNRMELEGASYQVPPQPNGMTNNLQGSNTYALENTMIFNSQPANPGTTATYLEGNMLITSESETQPVNRVAYNVGGQMATNNQSSTTAPATGTYNLQEIVPGGVWMERDVYLQGPIWAKIPETGAHFHPSPAMGGFGLKHPPPMMLIKNTPVPGNTTSFSDVPVSSFITQYSTGQVTVEMEWELKKENSKRWNPEIQYTNNYNDPQFVDFAPDSTGEYRTTRPIGTRYLTRPL

SEQ ID NO: 859 - protein, 724 aa, Artificial Sequence
  Description of Artificial Sequence: Synthetic polypeptide
MSFVDHPPDWLEEVGEGLREFLGLEAGPPKPKPNQQHQDQARGLVLPGYNYLGPGNGLDRGEPVNRADEVAREHDISYNEQLEAGDNPYLKYNHADAEFQEKLADDTSFGGNLGKVVFQAKKRVLEPFGLVEEGAKTAPTGKRIDDHFPKRKKARTEEDSKPSTSSDAEAGPSGSQQLQIPAQPASSLGADTMSAGGGGPLGGNNQGADGVGNASGDWHCDSTWMGDRVVTKSTRTWVLPSYNNHQYREIKSGSVDGSNANAYFGYSTPWGYFDFNRFHSHWGPRDWQRLINNYWGFRPRSLRVKIFNIQVKEVTVQDSTTTIANNLTSTVQVFTDDDYQLPYVVGNGTEGCLPAFPPQVFTLPQYGYATLNRDNTENPTERSSFFCLEYFPSKMLRTGNNFEFTYNFEEVPFHSSFAPSQNLFKLANPLVDQYLYRFVSTNNTGGVQFNKNLAGRYANTYKNWFPGPMGRTQGWNLGSGVNRASVSALATTNRMELEGASYQVPPQPNGMTNNLQGSNTYALENTMIFNSQPANPGTTATYLEGNMLITSESETQPVNRVAYNVGGQMATNNQSSTTAPATGTYNLQEIVPGSVWMERDVYLQGPIWAKIPETGAHFHPSPAMGGFGLKHPPPMMLIKNTPVPGNITSFSDVPVSSFITQYSTGQVTVEMEWELKKENSKRWNPEIQYTNNYNDPQFVDFAPDSTGEYRTTRPIGTRYLTRPL

SEQ ID NO: 860 - protein, 723 aa, Artificial Sequence
  Description of Artificial Sequence: Synthetic polypeptide
MSFVDHPPDWLEEVGEGLREFLGLEAGPPKPKPNQQHQDQARGLVLPGYNYLGPGNGLDRGEPVNRADEVAREHDISYNEQLEAGDNPYLKYNHADAEFQEKLADDTSFGGNLGKAVFQAKKRVLEPFGLVEEGAKTAPTGKRIDDHFPKRKKARTEEDSKPSTSSDAEAGPSGSQQLQIPAQPASSLGADTMSAGGGGPLGDNNQGADGVGNASGDWHCDSTWMGDRVVTKSTRTWVLPSYNNHQYREIKSGSVDGSNANAYFGYSTPWGYFDFNRFHSHWSPRDWQRLINNYWGFRPRSLRVKIFNIQVKEVTVQDSTTTIANNLTSTVQVFTDDDYQLPYVVGNGTEGCLPAFPPQVFTLPQYGYATLNRDNTENPTERSSFFCLEYFPSKMLRTGNNFEFTYNFEEVPFHSSFAPSQNLFKLANPLVDQYLYRFVSTNNTGGVQFNKNLAGRYANTYKNWFPGPMGRTQGWNLGSGVNRASVSAFATTNRMELEGASYQVPPQPNGMTNNLQGSNTYALENTMIFNSQPANPGTTATYLEGNMLITSESETQPVNRVAYNVGGQMATNNQSSTTAPATGTYNLQEIVPGSVWMERDVYLQGPIAKIPETGAHFHPSPAMGGFGLKHPPPMMLIKNTPVPGNITSFSDVPVSSFITQYSTGQVTVEMEWELKKENSKRWNPEIQYTNNYNDPQFVDFAPDSTGECRTTRPIGTRYLTRPL

SEQ ID NO: 861 - protein, 724 aa, Artificial Sequence
  Description of Artificial Sequence: Synthetic polypeptide
MSFVDHPPDWLEEVGEGLREFLGLEAGPPKPKPNQQHQDQARGLVLPGYNYLGPGNGLDRGEPVNRADEVAREHDISYNEQLEAGDNPYLKYNHADAEFQEKLADDTSFGGNLGKAVFQAKKRVLEPFGLVEEGAKTAPTGKRIDDHFPKRKKARTEEDSKPSTSSDAEAGPSGSQQLQIPAQPASSLGADTMSAGGGGPLGDNNQGADGVGNASGDWHCDSTWMGDRVVTKSTRTWVLPSYNNHQYREIKSGSVDGSNANAYFGYSTPWGYFDFNRFHSHWSPRDWQRLINNYWGFRPRSLRVKILNIQVKEVTVQDSTTTIANNLTSTVQVFTDDDYQLPYVVGNGTEGCLPAFPPQVFTLPQYGYATLNRDNTENPTERSSFFCLEYFPSKMLRTGNNFEFTYNFEEVPFHSSFAPSQNLFKLANPLVGQYLYRFVSTNNTGGVQFNENLAGRYANTYKNWFPGPMGRTQGWNLGSGVNRASVSAFATTNRMELEGASYQVPPQPNGMTNNLQGSNTYALENTMIFNSQPANPGTTATYLEGNMLITSESETQPVNRVAYNVGGQMATNNQSSTTAPATGTYNLQEIVPGSVWMERDVYLQGPIWAKIPETGAHFHPSPAMGGFGLKHPPPMMLIKNTPVPGNITSFSDVPVSSFITQYSTGQATVEMEWELKKENSKRWNPEIQYTNNYNDPQFVDFAPDSTGEYRTTRPIGTRYLTRPL

SEQ ID NO: 862 - protein, 724 aa, Artificial Sequence
  Description of Artificial Sequence: Synthetic polypeptide
MSFVDHPPDWLEEVGEGLREFLGLEAGPPKPKPNQQHQDQARGLVLPGYNYLGPGNGLDRGEPVNRADEVAREHDISYNEQLEAGDNPYLKYNHADAEFQEKLADDTSFGGNLGKAVFQAKKRVLEPFGLVEEGAKTAPTGKRIDDHFPKRKKARTEEDSKPSTSSDAEAGPSGSQQLQIPAQPASSLGADTMSAGGGGPLGDNNQGADGVGNASGDWHCDSTWMGDRVVTKSTRTWVLPSYNNHQYREIKSGSVDGSNANAYFGYSTPWGYFDFNRFHSHWSPRDWQRLINNYWGFRPRSLRVKIFNIQVKEVTVQDSTTIIANNLTSTVQVFTDDDYQLPYVVGNGTEGCLPAFPPQVFTLPQYGYATLNRDNTENPTERSSFFCLEYFPSKMLRTGNNFEFTYNFEEVPFHSSFAPSQNLFKLANPLVDQYLYRFVSTNNTGGVQFNKNLAGRYANTYKNWFPGPMGRTQGWNLGSGVNRASVSAFATTNRMELEGASYQVPPQPNGMTNNLQGSNTYALENTMIFNSQPANPGTTATYLEGNMLITSESETQPVNRVAYNVGGQMATNNQSSTTAPATGTYNLQEIVPGSVWMERDVYLQGPIWAKIPETGAHFHPSPAMGGFGLKHPPPMMLIKNTPVPGNITSFSDVPVSSFITQYSTGQVTVEMEWELKKENSKRWNPEIQYTNNYNDPQFVDFAPDSTGEYRTTRPIGTRYLTRPL

SEQ ID NO: 863 - protein, 724 aa, Artificial Sequence
  Description of Artificial Sequence: Synthetic polypeptide
MSFVDHPPDWLEEVGEGLREFLGLEAGPPKPKPNQQHQDQARGLVLPGYNYLGPGNGLDRGEPVNRADEVAREHDISYNEQLEAGDNPYLKYNHADAEFQEKLADDTSFGGNLGKAVFQAKKRVLEPFGLVEEGAKTAPTGKRIDDHFPKRKKARTEEDSKPSTSSDAEAGPSGSQQLQIPAQPASSLGADTMSAGGGGPLGDNNQGADGVGNASGDWHCDSTWMGDRVVTKSTRTWVLPSYNNHQYREIKSGSVDGSNANAYFGYSTPWGYFDFNRFHSHWSPRDWQRLINNYWGFRPRSLRVKIFNIQVKEVTVQDSTTTIANNLTSTVQVFTDDDYQLPYVVGNGTEGCLPAFPPQVFTLPQYGYATLNRDNTENPTERSSFFCLEYFPSKMLRTGNNFEFTYNFEEVPFHSSFAPSQNLFKLANPLVDQYLYRFVSTNNTGGVQFNKNLAGRYANTYKNWFPGPMGRTQGWNLGSGVNRASVSAFATTNRMELEGASYQVPPQPNGMTNNLQGSNTYALENTMIFNSQPANPGTTATYLEGNMLITSESETQPVNRVAYNVGGQMATNNQSSTTAPATGTYNLQEIVPGSVWMERDVYLQGPIWAKIPETGAHFHPSPAMGGFGLKHPPPMMLIKNTPVPGNITSLSDVPVSSFITQYSTGQVTVEMEWELKKENSKRWNPEIQYTNNYNDPQFVDFAPDSTGEYRTTRPIGTRYLTRPL

SEQ ID NO: 864 - protein, 724 aa, Artificial Sequence
  Description of Artificial Sequence: Synthetic polypeptide
MSFVDHPPDWLEEVGEGLREFLGLEAGPPKPKPNQQHQDQARGLVLPGYNYLGPGNGLDRGEPANRADEVAREHDISYNEQLEAGDNPYLKYNHAGAEFQEKLADDTSFGGNLGKAVFQAKKRVLEPFGLVEEGAKTAPTGKRIDDHFPKRKKARTEEDSKPSTSSDAEAGPSGSQQLQIPAQPASSLGADTMSAGGGGPLGDNNQGADGVGNASGDWHCDSTWMGDRVVTKSTRTWVLPGYNNHQYREIKSGSVDGSNANAYFGYSTPWGYFDFNRFHSHWSPRDWQRLINNYWGFRPRSLRVKIFNIQVKEVTVQDSTTTIANNLTSTVQVFTDDDYQLPYVVGNGTEGCLPAFPPQVFTLPQYGYATLNRDNTENPTERSSFFCLEYFPSKMLRTGNNFEFTYNFEEVPFHSSFAPSQNLFKLANPLVDQYLYRFVSTNNTGGVQFNKNLAGRYANTYKNWFPGPMGRTQGWNLGSGVNRASVSAFATTNRMELEGASYQVPPQPNGMTNNLQGSNTYALENTMIFNSQPANPGTTATYLEGNMLITSESETQPVNRVAYNVGGQMATNNQSSTTAPATGTYNLQEIVPGSVWMERDVYLQGPIWAKIPETGAHFHPSPAMGGFGLKHPPPMMLIKNTPVPGNITSFSDVPVSSFITQYSTGQVTVEMEWELKKENSKRWNPEIQYTNNYNDPQFVDFAPDSTGEYRTTRPIGTRYLTRPL

SEQ ID NO: 865 - protein, 724 aa, Artificial Sequence
  Description of Artificial Sequence: Synthetic polypeptide
MSFVDHPPDWLEEVGEGLREFLGLEAGPPKPKPNQQHQDQARGLVLPGYNYLGPGNGLDRGEPVNRADEVAREHDISYNEQLEAGDNPYLKYNHADAEFQEKLADDTSFGGNLGKAVFQAKKRVLEPFGLVEEGAKTAPTGKRIDDHFPKRKKARTEEDSKPPTSSDAEAGPSGSQQLQIPAQPASSLGADTMSAGGGGPLGDNNQGADGVGNASGDWHCDSTWMGDRVVTKSTRTWVLPSYNNHQYREIKSGSVDGSNANAYFGYSTPWGYFDFNRFHSHWSPRDWQRLINNYWGFRPRSLRVKIFNIQVKEVTVQDSATTIANNLTSTVQVFTDDDYQLPYVVGNGTEGCLPAFPPQVFTLPQYGYATLNRDNTENPTERSSFFCLEYFPSKMLRTGNNFEFTYNFEEVPFHSSFAPSQNLFKLANPLVDQYLYRFVSTNNTGGVQFNKNLAGRYANTYKNWFPGPMGRTQGWNLGSGVNRASVSAFATTNRMELEGASYQVPPQPNGMTNNLQGSNTYALENTMIFNSQPANPGTTATYLEGNMLITSESETQPVNRVAYNVGGQMATNNQSSTTAPATGTYNLQEIVPGSVWMERDVYLQGPIWAKIPETGAHFHPSPAMGGFGLKHPPPMMLIKNTPVPGNITSFSDVPVSSFITQYSTGQVTVEMEWELKKENSKRWNPEIQYTNNYNDPQFVDFAPDSTGEYRTTRPIGTRYLTRPL

SEQ ID NO: 866 - protein, 724 aa, Artificial Sequence
  Description of Artificial Sequence: Synthetic polypeptide
MSFVDHPPDWLEEVGEGLREFLGLEAGPPKPKPNQQHQDQARGLVLPGYNYLGPGNGLDRGEPVNRADEVAREHDISYNEQLEAGDNPYLKYNHADAEFQEKLADDTSFGGNLGKAVFQAKKRVLEPFGLVEEGAKTAPTGKRIDDHFPKRKKARTEEDSKPSTSSDAEAGPSGSQQPQIPAQPASSLGADTMSAGGGGPLGDNNQGADGVGNASGDWHCDSTWMGDRVVTKSTRTWVLPSYNNHQYREIKSGSVDGSNANAYFGYSTPWGYFDFNRFHSHWSPRDWQRLINNYWGFRPRSLRVKIFNIQVKEVTVQDSTTTIANNLTSTVQVFTDDDYQLPYVVGNGTEGCLPAFPPQVFTLPQYGYATLNRDNTENPTERSSFFCLEYFPSKMLRTGNNFEFTYNFEEVPFHSSFAPSQNLFKLANPLVDQYLYRFVSTNNTGGVQFNKNLAGRYANTYKNWFPGPMGRTQGWNLGSGVNRASVSAFATTNRMELEGASYQVPPQPNGMTNNLQGSNTYALENTMIFNSQPANPGTTATYLEGNMLITSESETQPVNRVAYNVGGQMATNNQSSTTAPATGTYNLQEIVPGSVWMERDVYLQGPIWAKIPETGAHFHPSPAMGGFGLKHPPPMMLIKNTPAPGNITSFSDVPVSSFITQYSTGQVTVEMEWELKKENSKRWNPEIQYTNNYNDPQFVDFAPDSTGEYRTTRPIGTRYLTRPL

SEQ ID NO: 867 - protein, 724 aa, Artificial Sequence
  Description of Artificial Sequence: Synthetic polypeptide
MSFVDHPPDWLEEVGEGLREFLGLEAGPPKPKPNQQHQDQARGLVLPGYNYLGPGNGLDRGEPVNRADEVAREHDISYNEQLEAGDNPYLKYNHADAEFQEKLADDTSFGGNLGKAVFQAKKRVLEPFGLVEEGAKTAPTGKRIDDHFPKRKKARTEEDSKPPTSSDAEAGPSGSQQLQIPAQPASSLGADTMSAGGGGPLGDNNQGADGVGNASGDWHCDSTWMGDRVVTKSTRTWVLPSYNNHQYREIKSGSVDGSNANAYFGYSTPWGYFDFNRFHSHWSPRDWQRLINNYWGFRPRSLRVKIFNIQVKEVTVQDSTTTIANNLTSTVQVFTDDDYQLPYVVGNGTEGCLPAFPPQVFTLPQYGYATLNRDNTENPTERSSFFCLEYFPSKMLRTGNNFEFTYNFEEVPFHSSFAPSQNLFKLANPLVDQYLYRFVSTNNTGGVQFNKNLAGRYANTYKNWFPGPMGRTQGWNLGSGVNRASVSAFATTNRMELEGASYQVPPQPNGMTNNLQGSNTYALENTMIFNSQPANPGTTATYLEGNMLITSESETQPVNRVAYNVGGQMATNNQSSTTAPATGTYNLQEIVPGSVWMERDVYLQGPIWAKIPETGAHFHPSPAMGGFGLKHPPPMMLIKNTPVPGNITSFSDVPVSSFITQYSTGQVTVEMEWELKKENSKRWNPEIQYTNNYNDPQFVDFAPDSTGEYRTTRPIGTRYLTRPL

SEQ ID NO: 868 - protein, 724 aa, Artificial Sequence
  Description of Artificial Sequence: Synthetic polypeptide
MSFVDHPPDWLEEVGEGLREFLGLEAGPPKPKPNQQHQDQARGLVLPGYNYLGPGNGLDRGEPVNRADEVAREHDISYNEQLEAGDNPYLKYNHADAEFQEKLADDTSFGGNLGKAVFQAKKRVLEPFGLVEEGAKTAPTGKRIDDHFPKRKKARTEEDSKPPTSSDAEAGPSGSQQLQIPAQPASSLGADTMSAGGGGPLGDNNQGADGVGNASGDWHCDSTWMGDRVVTKSTRTWVPPSYNNHQYREIKSGSVDGSNANAYFGYSTPWGYFDFNRFHSHWSPRDWQRLINNYWGFRPRSLRVKIFNIQVKEVTVQDSTTTIANNLTSTVQVFTDDDYQLPYVVGNGTEGCLPAFPPQVFTLPQYGYATLNRDNTENPTERSSFFCLEYFPSKMLRTGNNFEFTYNFEEVPFHSSFAPSQNLFKLANPLVDQYLYRFVSTNNTGGVQFNKNLAGRYANTYKNWFPGPMGRTQGWNLGSGVNRASVSAFATTNRMELEGASYQVPPQPNGMTNNLQGSNTYALENTMIFNSQPANPGTTATYLEGNMLITSESETQPVNRVAYNVGGQMATNNQSSTTAPATGTYNLQEIVPGSVWMERDVYLQGPIWAKIPETGAHFHPSPAMGGFGLKHPPPMMLIKNTPVPGNITSFSDVPVSSFITQYSTGQVAVEMEWELKKENSKRWNPEIQYTNNYNDPQFVDFAPDSTGEYRTTRPIGTRYLTRPL

SEQ ID NO: 869 - protein, 724 aa, Artificial Sequence
  Description of Artificial Sequence: Synthetic polypeptide
MSFVDHPPDWLEEVGEGLREFLGLEAGPPKPKPNQQHQDQARGLVLPGYNYLGPGNGLDRGEPVNRADEVAREHDISYNEQLEAGDNPYLKYNHADAEFQEKLADDTSFGGNLGKAVFQAKKRVLEPFGLVEEGAKTAPTGKRIDDHFPKRKKARTEEDSKPSTSSDAEAGPSGSQQLQIPAQPASSLGADTMSAGGGGPLGDNNQGADGVGNASGDWHCDSTWMGDRVVTKSTRTWVLPSYNNHQYREIKSGSVDGSNANAYFGYSTPWGYFDFNRFHSHWSPRDWQRLINNYWGFRPRSLRVKIFNIQVKEVTVQDSTTTIANNLTSTVQVFTDDDYQLPYVVGNGTEGCLPAFPPQVFTLPQYGYATLNRDNTENPTERSSFFCLEYFPSKMLRTGNNFEFTYNFEEVPFHSSFAPSQNLFKLANPLVDQYLYRFVSTNNTGGVQFNKNLAGRYANTYKNWFPGPMGRTQGWNLGSGVNRASVSAFATTNRMELEGASYQVPPQPNGMTNNLQGSNTYALENTMIFNSQPANPGTTATYLEGNMLITSESETQPVNRVAYNVGGQMATNNQSSTTAPATGTYNLQEIVPGSVWMERDVYLQGPIWAKIPETGAHFHPSPAMGGFGLKHPPPMMLIKNTPAPGNITSFSDVPVSSFITQYSTGQVTVEMEWELKKENSKRWNPEIQYTNNYNDPQFVDFAPDSTGEYRTTRPIGTRYLTRPL

SEQ ID NO: 870 - protein, 724 aa, Artificial Sequence
  Description of Artificial Sequence: Synthetic polypeptide
MSFVDHPPDWLEEVGEGLREFLGLEAGPPKPKPNQQHQDQARGLVLPGYNYLGPGNGLDRGEPVNRADEVAREHDISYNEQLEAGDNPYLKYNHADAEFQEKLADDTSFGGNLGKAVFQAKKRVLEPFGLAEEGAKTAPTGKRIDDHFPKRKKARTEEDSKPSTSSDAEAGPSGSQQLQIPAQPASSLGADTMSAGGGGPLGDNNQGADGVGNASGDWHCDSTWMGDRVVTKSTRTWVLPSYNNHQYREIKSGSVDGSNANAYFGYSTPWGYFDFNRFHSHWSPRDWQRLINNYWGFRPRSLRAKIFNIQVKEVTVQDSTTTIANNLTSTVQVFTDDDYQLPYVVGNGTEGCLPAFPPQVFTLPQYGYATLNRDNTENPTERSSFFCLEYFPSKMLRTGNNLEFTYNFEEVPFHSSFAPSQNLFKLANPLVDQYLYRFVSTNNTGGVQFNKNLAGRYANTYKNWFPGPMGRTQGWNLGSGVNRASVSAFATTNRMELEGASYQVPPQPNGMTNNLQGSNTYALENTMIFNSQPANPGTTATYLEGNMLITSESETQPVNRVVHNVGGQMATNNQSSTTAPATGTYNLQEIVPGSVWMERDVYLQGPIWAKIPETGAHFHPSPAMGGFGLKHPPPMMLIKNTPVPGNITSFSDVPVSSFITQYSTGQVTVEMEWELKKENSKRWNPEIQYTNNYNDPQFVDFAPDSTGEYRTTRPIGTRYLTRPL

SEQ ID NO: 871 - protein, 724 aa, Artificial Sequence
  Description of Artificial Sequence: Synthetic polypeptide
MSFVDHPPDWLEEVGEGLREFLGLEAGPPKPKPNQQHQDQARGLVLPGYNYLGPGNGLDRGEPVNRADEVAREHDISYNEQLEAGDNPYLKYNHADAEFQEKLADDTSFGGNLGKAVFQAKKRVLEPFGLVEEGAKTAPTGKRIDDHFPKRKKARTEEDSKPSTSSDAEAGPSGSQQLQIPAQPASSLGADTMSAGGGGPLGDNNQGADGVGNASGDWHCDSTWMGDRVVTKSTRTWVLPSYNNHQYREIKSGSVDGGNANAYFGYSTPWGYFDFNRFHSHWSPRDWQRLINNYWGFRPRSLRVKIFNIQVKEVTVQDSTTTIANNLTSTVQVFTDDDYQLPYVVGNGTEGCLPAFPPQVFTLPQYGYATLNRDNTENPTERSSFFCLEYFPSKMLRTGNNFEFTYNFEEVPFHSSFAPSQNLFKLANPLVDQYLYRFVSTNNTGGVQFNKNLAGRYANTYKNWFPGPMGRTQGWNLGSGVNRASVSAFATTNRMELEGASYQVPPQPNGMTNNLQGSNTYALENTMIFNSQPANPGTTATYLEGNMLITSESETQPVNRVAYNVGGQMATNNQSSTTAPATGTYNLQEIVPGSVWMERDVYLQGPIWAKIPETGAHFHPSPAMGGFGLKHPPPMMLIKNTPAPGNITSFSDVPVSSFITQYSTGQVTVEMEWELKKGNSKRWNPEIQYTNNYNDPQFVDFAPDSTGEYRTTRPIGTRYLTRPL

SEQ ID NO: 872 - protein, 724 aa, Artificial Sequence
  Description of Artificial Sequence: Synthetic polypeptide
MSFVDHPPDWLEEVGEGLREFLGLEAGPPKPKPNQQHQDQARGLVLPGYNYLGPGNGLDRGEPVNRADEVAREHDISYNEQLEAGDNPYLKYNHADAEFQEKLADDTSFGGNLGKAVFQAKKRVLEPFGLVEEGAKTAPTGKRIDDHFPKRKKARTEEDSKPSTSSDAEAGPSGSQQLQIPAQPASSLGADTMSAGGGGPLGDNNQGADGVGNASGDWHCDSTWMGDRVVTKSTRTWVLPSYNNHQYREIKSGSVDGSNANAYFGYSTPWGYFDFNRFHSHWSPRDWQRLINNYWGFRPRSLRVKIFNIQVKEVTVQDSTTTIANNLTSTVQVFTDDDYQLPYVVGNGTEGCLPAFPPQVFTLPQYGYATLNRDNTENPTERSSFFCLEYFPSKMLRTGNNFEFTYNFEEVPFHSSFAPSQNLFKLANPLVDQYLYRFVSTNNTGGVQFNKNLAGRYANTYKNWFPGPMGRTQGWNLGSGVNRASVSAFATTNRMELEGASYQVPPQPNGMTNNLQGSNTYALENTMIFNSQPANPGTTATYLEGNMLITSESETQPVNRVAYNVGGQMATNNQSSTTAPATGTYNLQEIVPGSVWMERDVYLQGPIWAKIPETGVHFHPSPAMGGFGLKHPPPMMLIKNTPVPGNITSFSDVPVSSFITQYSTGQVTVEMEWELKKENSKRWNPEIQYTNNYNDPQFVDFAPDSTGEYRTTRPIGTRYLTRPL

SEQ ID NO: 873 - protein, 724 aa, Artificial Sequence
  Description of Artificial Sequence: Synthetic polypeptide
  MOD_RES (551)..(551): Any naturally occurring amino acid
MSFVDHPPDWLEEVGEGLREFLGLEAGPPKPKPNQQHQDQARGLVLPGYNYLGPGNGLDRGEPVNRADEVAREHDISYNEQLEAGDNPYLKYNHADAEFQEKLADDTSFGGNLGKAVFQAKKRVLEPFGLVEEGAKTAPTGKRIDDHFPKRKKARTEEDSKPSTSSDAEAGPSGSQQLQIPAQPASSLGADTMSAGGGGPLGDNNQGADGVGNASGDWHCDSTWMGDRVVTKSTRTWVLPSYNNHQYREIKSGSVDGSNANAYFGYSTPWGYFDFNRFHSHWSPRDWQRLINNYWGFRPRSLRVKIFNIQVKEVTVQDSTTTIANNLTSTVQVFTDDDYQLPYVVGNGTEGCLPAFPPQVFTLPQYGYATLNRDNTENPTERSSFFCLEYFPSKMLRTGNNFEFTYNFEEVPFHSSFAPSQNLFKLANPLVDQYLYRFVSTNNTGGVQFNKNLAGRYANTYKNWFPGPMGRTQGWNLGSGVNRASVSAFATTNRMELEGASYQVPPQPNGMTNNLQGSNTYALENTMIFNSQPANPGTTATYLEGSMLITXESETQPVNRVAYNVGGQMATNNQSSTTAPATGTYNLQEIVPGSVWMERDVYLQGPIWAKIPETGAHFHPSPAMGGFGLKHPPPMMLIKNTPVPGNITSFSDVPVSSFITQYSTGQVTVEMEWELKKENSKRWNPEIQYTNNYNDPQFVDFAPDSTGEYRTTRPIGTRYLTRPL

SEQ ID NO: 874 - protein, 736 aa, Artificial Sequence; identical to SEQ ID NO: 48
  Description of Artificial Sequence: Synthetic polypeptide

SEQ ID NO: 875 - protein, 734 aa, Artificial Sequence; identical to SEQ ID NO: 66
  Description of Artificial Sequence: Synthetic polypeptide

SEQ ID NO: 876 - protein, 723 aa, Artificial Sequence
  Description of Artificial Sequence: Synthetic polypeptide
MSFVDHPPDWLEEVGEGLREFLGLEAGPPKPKPNQQHQDQARGLVLPGYNYLGPGNGLDRGEPVNRADEVAREHDISYNEQLEAGDNPYLKYNHADAEFQEKLADDTSFGGNLGKAVFQAKKRVLEPFGLVEEGAKTAPTGKRIDDHFPKRKKARTEEDSKPSTSSDAEAGPSGSQQLQIPAQPASSLGADTMSAGGGPLGDNNQGADGVGNASGDWHCDSTWMGDRVVTKSTRTWVLPSYNNHQYREIKSGSVDGSNANAYFGYSTPWGYFDFNRFHSHWSPRDWQRLINNYWGFRPRSLRVKIFNIQVKEVTVQDSTTTIANNLTSTVQVFTDDDYQLPYVVGNGTEGCLPAFPPQVFTLPQYGYATLNRDNTENPTERSSFFCLEYFPSKMLRTGNNFEFTYNFEEVPFHSSFAPSQNLFKLANPLVDQYLYRFVSTNNTGGVQFNKNLAGRYANTYKNWFPGPMGRTQGWNLGSGVNRASVSAFATTNRMELEGASYQVPPQPNGMTNNLQGSNTYALENTMIFNSQPANPGTTATYLEGNMLITSESETQPVNRVAYNVGGQMATNNQSSTTAPATGTYNLQEIVPGSVWMERDVYLQGPIWAKIPETGAHFHPSPAMGGFGLKHPPPMMLIKNTPVPGNITSFSDVPVSSFITQYSTGQVTVEMEWELKKENSKRWNPEIQYTNNYNDPQFVDFAPDSTGEYRTTRPIGTRYLTRPL

SEQ ID NO: 877 - protein, 534 aa, Artificial Sequence
  Description of Artificial Sequence: Synthetic polypeptide
MAEGGGGAMGDSSGGADGVGNASGNWHCDSQWMGNTVITKTTRTWVLPSYNNHIYKAITSGTSQDANVQYAGYSTPWGYFDFNRFHCHFSPRDWQRLINNHWGIRPKSLKFKIFNVQVKEVTTQDQTKTIANNLTSTIQVFTDDEHQLPYVLGSATEGTMPPFPSDVYALPQYGYCTMHTNQNGARFNDRSAFYCLEYFPSQMLRTGNNFEFTFDFEEVPFHSMFAHSQDLDRLMNPLVDQYLWNFNEVDSSRNAQFKKAVKGAYGTMGRNWLPGPKFLDQRVRAYTGGTDNYANWNIWSNGNKVNLKDRQYLLQPGPVSATYTEGEASSLPAQNILGIAKDPYRSGSTTAGISDIMVTEEQEVAPTNGVGWKPYGRTVTNEQNTTTAPTSSDLDVLGALPGMVWQNRDIYLQGPIGAKIPKTDGKFHPSPNLGGFGLHNPPPQVFIKNTPVPADPPVEYVHQKWNSYITQYSTGQCTVEMVWELRKENSKRWNPEIQFTSNFSNRTSIMFAPNETGGYVEDRLIGTRYLTQNL

SEQ ID NO: 878 - protein, 554 aa, Artificial Sequence
  Description of Artificial Sequence: Synthetic polypeptide
MTSVNSAEASTGAGGGGSNPVKSMWSEGATFSANSVTCTFSRQFLIPYDPEHHYKVFSPAASSCHNASGKEAKVCTISPIMGYSTPWRYLDFNALNLFFSPLEFQHLIENYGSIAPDALTVTISEIAVKDVTDKTGGGVQVTDSTTGRLCMLVDHEYKYPYVLGQGQDTLAPELPIWVYFPPQYAYLTVGDVNTQGISGDSKKLASEESAFYVLEHSSFQLLGTGGTATMSYKFPPVPPENLEGCSQHFYEMYNPLYGSRLGVPDTLGGDPKFRSLTHEDHAIQPQNFMPGPLVNSVSTKEGDSFNTGAGKALTGLSTGTSQNTRISLRPGPVSQPYHHWDTDKYVTGINAISHGQTTYGNAEDKEYQQGVGRFPNEKEQLKQLQGLNMHTYFPNKGTQQYTDQIERPLMVGSVWNRRALHYESQLWSKIPNLDDSFKTQFAALGGWGLHQPPPQIFLKILPQSGPIGGIKSMGITTLVQYAVGIMTVTMTFKLGPRKATGRWNPQPGVYPPHAAGHLPYVLYDPTATDAKQHHRHGYEKPEELWTAKSRVHPL

SEQ ID NO: 879 - protein, 587 aa, Artificial Sequence
  Description of Artificial Sequence: Synthetic polypeptide
MSDGTSQPDGGNAVHSAARVERAADGPGGSGGGGSGGGGVGVSTGSYDNQTHYRFLGDGWVEITALATRLVHLNMPKSENYCRIRVHNTTDTSVKGNMAKDDAHEQIWTPWSLVDANAWGVWLQPSDWQYICNTMSQLNLVSLDQEIFNVVLKTVTEQDSGGQAIKIYNNDLTACMMVAVDSNNILPYTPAANSMETLGFYPWKPTIASPYRYYFCVDRDLSVTYENQEGTIEHNVMGTPKGMNSQFFTIENTQQITLLRTGDEFATGTYYFDTNPVKLTHTWQTNRQLGQPPLLSTFPEADTDAGTLTAQGSRHGATQMEVNWVSEAIRTRPAQVGFCQPHNDFEASRAGPFAAPKVPADVTQGMDREANGSVRYSYGKQHGENWAAHGPAPERYTWDETNFGSGRDTRDGFIQSAPLVVPPPLNGILTNANPIGTKNDIHFSNVFNSYGPLTTFSHPSPVYPQGQIWDKELDLEHKPRLHITAPFVCKNNAPGQMLVRLGPNLTDQYDPNGATLSRIVTYGTFFWKGKLTMRAKLRANTTWNPVYQVSVEDNGNSYMSVTKWLPTATGNMQSVPLITRPVARNTY

SEQ ID NO: 880 - protein, 584 aa, Artificial Sequence
  Description of Artificial Sequence: Synthetic polypeptide
MSDGAVQPDGGQPAVRNERATGSGNGSGGGGGGGSGGVGISTGTFNNQTEFKFLENGWVEITANSSRLVHLNMPESENYKRVVVNNMDKTAVKGNMALDDIHVEIVTPWSLVDANAWGVWFNPGDWQLIVNTMSELHLVSFEQEIFNVVLKTVSESATQPPTKVYNNDLTASLMVALDSNNTMPFTPAAMRSETLGFYPWKPTIPTPWRYYFQWDRTLIPSHTGTSGTPTNVYHGTDPDDVQFYTIENSVPVHLLRTGDEFATGTFFFDCKPCRLTHTWQTNRALGLPPFLNSLPQSEGATNFGDIGVQQDKRRGVTQMGNTDYITEATIMRPAEVGYSAPYYSFEASTQGPFKTPIAAGRGGAQTDENQAADGDPRYAFGRQHGQKTTTTGETPERFTYIAHQDTGRYPEGDWIQNINFNLPVTNDNVLLPTDPIGGKTGINYTNIFNTYGPLTALNNVPPVYPNGQIWDKEFDTDLKPRLHINAPFVCQNNCPGQLFVKVAPNLTNQYDPDASANMSRIVTYSDFWWKGKLVFKAKLRASHTWNPIQQMSINVDNQFNYVPNNIGAMKIVYEKSQLAPRKLY

SEQ ID NO: 881 - protein, 548 aa, Artificial Sequence
  Description of Artificial Sequence: Synthetic polypeptide
GVGISTGTFNNQTEFKFLENGWVEITANSSRLVHLNMPESENYRRVVVNNMDKTAVNGNMALDDIHAQIVTPWSLVDANAWGVWFNPGDWQLIVNTMSELHLVSFEQEIFNVVLKTVSESATQPPTKVYNNDLTASLMVALDSNNTMPFTPAAMRSETLGFYPWKPTIPTPWRYYFQWDRTLIPSHTGTSGTPTNIYHGTDPDDVQFYTIENSVPVHLLRTGDEFATGTFFFDCKPCRLTHTWQTNRALGLPPFLNSLPQSEGATNFGDIGVQQDKRRGVTQMGNTNYITEATIMRPAEVGYSAPYYSFEASTQGPFKTPIAAGRGGAQTDENQAADGNPRYAFGRQHGQKTTTTGETPERFTYIAHQDTGRYPEGDWIQNINFNLPVTNDNVLLPTDPIGGKTGINYTNIFNTYGPLTALNNVPPVYPNGQIWDKEFDTDLKPRLHVNAPFVCQNNCPGQLFVKVAPNLTNEYDPDASANMSRIVTYSDFWWKGKLVFKAKLRASHTWNPIQQMSINVDNQFNYVPSNIGGMKIVYEKSQLAPRKLY

SEQ ID NO: 882 - protein, 736 aa, Artificial Sequence; identical to SEQ ID NO: 110
  Description of Artificial Sequence: Synthetic polypeptide

SEQ ID NO: 883 - protein, 736 aa, Artificial Sequence; identical to SEQ ID NO: 105
  Description of Artificial Sequence: Synthetic polypeptide

SEQ ID NO: 884 - protein, 736 aa, Artificial Sequence
  Description of Artificial Sequence: Synthetic polypeptide
MAADGYLPDWLEDTLSEGIRQWWKLKPGPPPPKPAERHKDDSRGLVLPGYKYLGPFNGLDKGEPVNEADAAALEHDKAYDRQLDSGDNPYLKYNHADAEFQERLKEDTSFGGNLGRAVFQAKKRVLEPLGLVEEPVKTAPGKKRPVEHSPVEEPDSSSGTGKAGQQPARKRLNFGQTGDADSVPDPQPLGQPPAAPSGLGTNTMATGSGAPMADNNEGADGVGNSSGNWHCDSTWMGDRVITTSTRTWALPTYNNHLYKQISSQSGASNDNHYFGYSTPWGYFDFNRFHCHFSPRDWQRLINNNWGFRPKRLNFKLFNIQVKEVTQNDGTTTIANNLTSTVQVFTDSEYQLPYVLGSAHQGCLPPFPADVFMVPQYGYLTLNNGSQAVGRSSFYCLEYFPSQMLRTGNNFTFSYTFEDVPFHSSYAHSQSLDRLMNPLIDQYLYYLSRTNTPSGTTTQSRLQFSQAGASDIRDQSRNWLPGPCYRQQRVSKTSADNNNSEYSWTGATKYHLNGRDSLVNPGPAMASHKDDEEKFFPQSGVLIFGKQGSEKTNVDIEKVMITDEEEIRTTNPVATEQYGSVSTNLQRGNRQAATADVNTQGVLPGMVWQDRDVYLQGPIWAKIPHTDGHFHPSPLMGGFGLKHPPPQILIKNTPVPANPSTTFSAAKFASFITQYSTGQVSVEIEWELQKENSKRWNPEIQYTSNYNKSVNVDFTVDTNGVYSEPRPIGTRYLTRNL

SEQ ID NO: 885 - protein, 736 aa, Artificial Sequence
  Description of Artificial Sequence: Synthetic polypeptide
MAADGYLPDWLEDNLSEGIREWWDLKPGAPKPKANQQKQDDGRGLVLPGYKYLGPFNGLDKGEPVNAADAAALEHDKAYDQQLKAGDNPYLRYNHADAEFQERLQEDTSFGGNLGRAVFQAKKRVLEPFGLVEEGAKTAPGKKRPVEQSPQEPDSSSGIGKTGQQPAKKRLNFGQTGDSESVPDPQPLGEPPATPAAVGPTTMASGGGAPMADNNEGADGVGNASGNWHCDSTWLGDRVITTSTRTWALPTYNNHLYKQISSASTGASNDNHYFGYSTPWGYFDFNRFHCHFSPRDWQRLINNNWGFRPKRLNFKLFNVQVKEVTTNDGVTTIANNLTSTVQVFSDSEYQLPYVLGSAHQGCLPPFPADVFMIPQYGYLTLNNGSQAVGRSSFYCLEYFPSQMLRTGNNFTFSYTFEDVPFHSSYAHSQSLDRLMNPLIDQYLYYLNRTQDQSGSAQNKDLLFSRGSPAGMSVQPKNWLPGPCYRQQRVSKTKTDNNNSNFTWTGASKYNLNGRESIINPGTAMASHKDDKNKFFPMSGVMIFGKESAGASNTALDNVMITDEEEIKATNPVATERFGTVAVNLQSSSTDPATGDVHVMGALPGMVWQDRDVYLQGPIWAKIPHTDGHFHPSPLMGGFGLKNPPPQILIKNTPVPANPPAEFSATKFASFITQYSTGQVSVEIEWELQKENSKRWNPEVQYTSNYAKSANVDFTVDNNGLYTEPRPIGTRYLTRPL

SEQ ID NO: 886 - protein, 737 aa, Artificial Sequence
  Description of Artificial Sequence: Synthetic polypeptide
MAADGYLPDWLEDTLSEGIRQWWKLKPGPPPPKPAERHKDDSRGLVLPGYKYLGPGNGLDKGEPVNAADAAALEHDKAYDQQLKAGDNPYLKYNHADAEFQERLKEDTSFGGNLGRAVFQAKKRVLEPLGLVEEGAKTAPGKKRPVEPSPQRSPDSSTGIGKKGQQPARKRLNFGQTGDSESVPDPQPLGEPPATPAAVGPTTMASGGGAPMADNNEGADGVGNASGNWHCDSTWLGDRVITTSTRTWALPTYNNHLYKQISSASTGASNDNHYFGYSTPWGYFDFNRFHCHFSPRDWQRLINNNWGFRPKRLNFKLFNIQVKEVTTNDGVTTIANNLTSTVQVFSDSEYQLPYVLGSAHQGCLPPFPADVFMIPQYGYLTLNNGSQAVGRSSFYCLEYFPSQMLRTGNNFTFSYTFEDVPFHSSYAHSQSLDRLMNPLIDQYLYYLNRTQNQSGSAQNKDLLFSRGSPAGMSVQPKNWLPGPCYRQQRVSKTKTDNNNSNFTWTGASKYNLNGRESIINPGTAMASHKDDKDKFFPMSGVMIFGKESAGASNTALDNVMITDEEEIKATNPVATERFGTVAVNLQSSSTDPATEDVHVMGALPGMVWQDRDVYLQGPIWAKIPHTDGHFHPSPLMGGFGLKNPPPQILIKNTPVPANPPAEFSATKFASFITQYSTGQVSVEIEWELQKENSKRWNPEVQYTSNYAKSANVDFTVDNNGLYTEPRPIGTRYLTRNL

SEQ ID NO: 887 - protein, 736 aa, Artificial Sequence
  Description of Artificial Sequence: Synthetic polypeptide
MAADGYLPDWLEDNLSEGIREWWDLKPGAPKPKANQQKQDDGRGLVLPGYKYLGPFNGLDKGEPVNAADAAALEHDKAYDQQLKAGDNPYLRYNHADAEFQERLQEDTSFGGNLGRAVFQAKKRVLEPFGLVEEGAKTAPGKKRPVEQSPQEPDSSSGIGKTGQQPAKKRLNFGQTGDSESVPDPQPLGEPPATPAAVGPTTMASGGGAPMADNNEGADGVGNASGNWHCDSTWLGDRVITTSTRTWALPTYNNHLYKQISSASTGASNDNHYFGYSTPWGYFDFNRFHCHFSPRDWQRLINNNWGFRPKRLNFKLFNVQVKEVTTNDGVTTIANNLTSTVQVFSDSEYQLPYVLGSAHQGCLPPFPADVFMIPQYGYLTLNNGSQAVGRSSFYCLEYFPSQMLRTGNNFTFSYTFEDVPFHSSYAHSQSLDRLMNPLIDQYLYYLNRTQDQSGSAQNKDLLFSRGSPAGMSVQPKNWLPGPCYRQQRVSKTKTDNNNSNFTWTGASKYNLNGRESIINPGTAMASHKDDKNKFFPMSGVMIFGKESAGASNTALDNVMITDEEEIKATNPVATERFGTVAVNLQSSSTDPATGDVHVMGALPGMVWQDRDVYLQGPIWAKIPHTDGHFHPSPLMGGFGLKHPPPQILIKNTPVPANPPAEFSATKFASFITQYSTGQVSVEIEWELQKENSKRWNPEVQYTSNYAKSANVDFTVDNNGLYTEPRPIGTRYLTRPL

SEQ ID NO: 888 - protein, 736 aa, Artificial Sequence
  Description of Artificial Sequence: Synthetic polypeptide
MAADGYLPDWLEDNLSEGIREWWDLKPGAPKPKANQQKQDDGRGLVLPGYKYLGPFNGLDKGEPVNAADAAALEHDKAYDQQLKAGDNPYLRYNHADAEFQERLQEDTSFGGNLGRAVFQAKKRVLEPFGLVEEGAKTAPGKKRPVEQSPQEPDSSSGIGKTGQQPAKKRLNFGQTGDSESVPDPQPLGEPPATPAAVGPTTMASGGGAPMADNNEGADGVGNASGNWHCDSTWLGDRVITTSTRTWALPTYNNHLYKQISSASTGASNDNHYFGYSTPWGYFDFNRFHCHFSPRDWQRLINNNWGFRPKRLNFKLFNVQVKEVTTNDGVTTIANNLTSTVQVFSDSEYQLPYVLGSAHQGCLPPFPADVFMIPQYGYLTLNNGSQAVGRSSFYCLEYFPSQMLRTGNNFTFSYTFEDVPFHSSYAHSQSLDRLMNPLIDQYLYYLNRTQDQSGSAQNKDLLFSRGSPAGMSVQPKNWLPGPCYRQQRVSKTKTDNNNSNFTWTGASKYNLNGRESIINPGTAMASHKDDKDKFFPMSGVMIFGKESAGASNTALDNVMITDEEEIKATNPVATERFGTVAVNLQSSSTDPATGDVHVMGALPGMVWQDRDVYLQGPIWAKIPHTDGHFHPSPLMGGFGLKHPPPQILIKNTPVPANPPAEFSATKFASFITQYSTGQVSVEIEWELQKENSKRWNPEVQYTSNYAKSANVDFTVDNNGLYTEPRPIGTRYLTRPL

SEQ ID NO: 889 - protein, 736 aa, Artificial Sequence
  Description of Artificial Sequence: Synthetic polypeptide
MAADGYLPDWLEDNLSEGIREWWDLKPGAPKPKANQQKQDDGRGLVLPGYKYLGPFNGLDKGEPVNAADAAALEHDKAYDQQLKAGDNPYLRYNHADAEFQERLQEDTSFGGNLGRAVFQAKKRVLEPFGLVEEGAKTAPGKKRPVEQSPQEPDSSSGIGKTGQQPAKKRLNFGQTGDSESVPDPQPLGEPPATPAAVGPTTMASGGGAPMADNNEGADGVGNASGNWHCDSTWLGDRVITTSTRTWALPTYNNHLYKQISSASTGASNDNHYFGYSTPWGYFDFNRFHCHFSPRDWQRLINNNWGFRPKRLNFKLFNIQVKEVTTNDGVTTIANNLTSTVQVFSDSEYQLPYVLGSAHQGCLPPFPADVFMIPQYGYLTLNNGSQAVGRSSFYCLEYFPSQMLRTGNNFTFSYTFEDVPFHSSYAHSQSLDRLMNPLIDQYLYYLNRTQDQSGSAQNKDLLFSRGSPAGMSVQPKNWLPGPCYRQQRVSKTKTDNNNSNFTWTGASKYNLNGRESIINPGTAMASHKDDKNKFFPMSGVMIFGKESAGASNTALDNVMITDEEEIKATNPVATERFGTVAVNLQSSSTDPATGDVHVMGALPGMVWQDRDVYLQGPIWAKIPHTDGHFHPSPLMGGFGLKHPPPQILIKNTPVPANPPAEFSATKFASFITQYSTGQVSVEIEWELQKENSKRWNPEVQYTSNYAKSANVDFTVDNNGLYTEPRPIGTRYLTRPL

SEQ ID NO: 890 - protein, 736 aa, Artificial Sequence
  Description of Artificial Sequence: Synthetic polypeptide
MAADGYLPDWLEDNLSEGIREWWDLKPGAPKPKANQQKQDDGRGLVLPGYKYLGPFNGLDKGEPVNAADAAALEHDKAYDQQLKAGDNPYLRYNHADAEFQERLQEDTSFGGNLGRAVFQAKKRVLEPFGLVEEGAKTAPGKKRPVEQSPQEPDSSSGIGKTGQQPAKKRLNFGQTGDSESVPDPQPLGEPPATPAAVGPTTMASGGGAPMADNNEGADGVGNASGNWHCDSTWLGDRVITTSTRTWALPTYNNHLYKQISSASTGASNDNHYFGYSTPWGYFDFNRFHCHFSPRDWQRLINNNWGFRPKRLNFKLFNVQVKEVTTNDGVTTIANNLTSTVQVFSDSEYQLPYVLGSAHQGCLPPFPADVFMIPQYGYLTLNNGSQAVGRSSFYCLEYFPSQMLRTGNNFTFSYTFEDVPFHSSYAHSQSLDRLMNPLIDQYLYYLNRTQNQSGSAQNKDLLFSRGSPAGMSVQPKNWLPGPCYRQQRVSKTKTDNNNSNFTWTGASKYNLNGRESIINPGTAMASHKDDKDKFFPMSGVMIFGKESAGASNTALDNVMITDEEEIKATNPVATERFGTVAVNLQSSSTDPATGDVHVMGALPGMVWQDRDVYLQGPIWAKIPHTDGHFHPSPLMGGFGLKHPPPQILIKNTPVPANPPAEFSATKFASFITQYSTGQVSVEIEWELQKENSKRWNPEVQYTSNYAKSANVDFTVDNNGLYTEPRPIGTRYLTRPL

SEQ ID NO: 891 - protein, 736 aa, Artificial Sequence
  Description of Artificial Sequence: Synthetic polypeptide
MAADGYLPDWLEDNLSEGIREWWDLKPGAPKPKANQQKQDDGRGLVLPGYKYLGPFNGLDKGEPVNAADAAALEHDKAYDQQLKAGDNPYLRYNHADAEFQERLQEDTSFGGNLGRAVFQAKKRVLEPFGLVEEGAKTAPGKKRPVEQSPQEPDSSSGIGKTGQQPAKKRLNFGQTGDSESVPDPQPLGEPPATPAAVGPTTMASGGGAPMADNNEGADGVGNASGNWHCDSTWLGDRVITTSTRTWALPTYNNHLYKQISSASTGASNDNHYFGYSTPWGYFDFNRFHCHFSPRDWQRLINNNWGFRPKRLNFKLFNVQVKEVTTNDGVTTIANNLTSTVQVFSDSEYQLPYVLGSAHQGCLPPFPADVFMIPQYGYLTLNNGSQAVGRSSFYCLEYFPSQMLRTGNNFTFSYTFEDVPFHSSYAHSQSLDRLMNPLIDQYLYYLNRTQNQSGSAQNKDLLFSRGSPAGMSVQPKNWLPGPCYRQQRVSKTKTDNNNSNFTWTGASKYNLNGRESIINPGTAMASHKDDKNKFFPMSGVMIFGKESAGASNTALDNVMITDEEEIKATNPVATERFGTVAVNLQSSSTDPATGDVHVMGALPGMVWQDRDVYLQGPIWAKIPHTDGHFHPSPLMGGFGLKHPPPQILIKNTPVPANPPAEFSATKFASFITQYSTGQVSVEIEWELQKENSKRWNPEVQYTSNYAKSANVDFTVDNNGLYTEPRPIGTRYLTRPL

SEQ ID NO: 892 - DNA, 2217 bp, Artificial Sequence
  Description of Artificial Sequence: Synthetic polynucleotide
atggctgccgatggttatcttccagattggctcgaggacaacctctctgagggcattcgcgagtggtgggacctgaaacctggagccccgaaacccaaagccaaccagcaaaagcaggacaacggccggggtctggtgcttcctggctacaagtacctcggacccttcaacggactcgacaagggggagcccgtcaacgcggcggacgcagcggccctcgagcacgacaaggcctacgaccagcagctccaagcgggtgacaatccgtacctgcggtataatcacgccgacgccgagtttcaggagcgtctgcaagaagatacgtcttttgggggcaacctcgggcgcgcagtcttccaggccaaaaagcgggttctcgaacctctgggcctggttgaatcgccggttaagacggctcctggaaagaagagaccggtagagccatcaccccagcgctctccagactcctctacgggcatcggcaagaaaggccagcagcccgcaaaaaagagactcaattttgggcagactggcgactcagagtcagtccccgaccctcaaccaatcggagaaccaccagcaggcccctctggtctgggatctggtacaatggctgcaggcggtggcgctccaatggcagacaataacgaaggcgccgacggagtgggtagttcctcaggaaattggcattgcgattccacatggctgggcgacagagtcatcaccaccagcacccgcacctgggccctgcccacctacaacaaccacctctacaagcaaatctccaacgggacctcgggaggaagcaccaacgacaacacctacttcggctacagcaccccctgggggtattttgacttcaacagattccactgccacttttcaccacgtgactggcagcgactcatcaacaacaactggggattccggcccaagaggctcaacttcaagctcttcaacatccaagtcaaggaggtcacgcagaatgaaggcaccaagaccatcgccaataaccttaccagcacgattcaggtctttacggactcggaataccagctcccgtacgtgctcggctcggcgcaccagggctgcctgcctccgttcccggcggacgtcttcatgattcctcagtacgggtacctgactctgaacaatggcagtcaggctgtgggccggtcgtccttctactgcctggagtactttccttctcaaatgctgagaacgggcaacaactttgaattcagctacaacttcgaggacgtgcccttccacagcagctacgcgcacagccagagcctggaccggctgatgaaccctctcatcgaccagtacttgtactacctgtcccggactcaaagcacgggcggtactgcaggaactcagcagttgctattttctcaggccgggcctaacaacatgtcggctcaggccaagaactggctacccggtccctgctaccggcagcaacgcgtctccacgacactgtcgcagaacaacaacagcaactttgcctggacgggtgccaccaagtatcatctgaatggcagagactctctggtgaatcctggcgttgccatggctacccacaaggacgacgaagagcgattttttccatccagcggagtcttaatgtttgggaaacagggagctggaaaagacaacgtggactatagcagcgtgatgctaaccagcgaggaagaaataaagaccaccaacccagtggccacagaacagtacggcgtggtggccgataacctgcaacagcaaaacgccgctcctattgtaggggccgtcaatagtcaaggagccttacctggcatggtgtggcagaaccgggacgtgtacctgcagggtcccatctgggccaagattcctcatacggacggcaactttcatccctcgccgctgatgggaggctttggactgaagcatccgcctcctcagatcctgattaaaaacacacctgttcccgcggatcctccgaccaccttcaatcaggccaagctggcttctttcatcacgcagtacagtaccggccaggtcagcgtggagatcgagtgggagctgcagaaggagaacagcaaacgctggaacccagagattcagtacacttccaactactacaaatctacaaatgtggactttgctgtcaatactgagggtacttattccgagcctcgccccattggcacccgttacctcacccgtaatctgtaa

SEQ ID NO: 893 - protein, 738 aa, Artificial Sequence
  Description of Artificial Sequence: Synthetic polypeptide
MAADGYLPDWLEDNLSEGIREWWDLKPGAPKPKANQQKQDNGRGLVLPGYKYLGPFNGLDKGEPVNAADAAALEHDKAYDQQLQAGDNPYLRYNHADAEFQERLQEDTSFGGNLGRAVFQAKKRVLEPLGLVESPVKTAPGKKRPVEPSPQRSPDSSTGIGKKGQQPAKKRLNFGQTGDSESVPDPQPIGEPPAGPSGLGSGTMAAGGGAPMADNNEGADGVGSSSGNWHCDSTWLGDRVITTSTRTWALPTYNNHLYKQISNGTSGGSTNDNTYFGYSTPWGYFDFNRFHCHFSPRDWQRLINNNWGFRPKRLNFKLFNIQVKEVTQNEGTKTIANNLTSTIQVFTDSEYQLPYVLGSAHQGCLPPFPADVFMIPQYGYLTLNNGSQAVGRSSFYCLEYFPSQMLRTGNNFEFSYNFEDVPFHSSYAHSQSLDRLMNPLIDQYLYYLSRTQSTGGTAGTQQLLFSQAGPNNMSAQAKNWLPGPCYRQQRVSTTLSQNNNSNFAWTGATKYHLNGRDSLVNPGVAMATHKDDEERFFPSSGVLMFGKQGAGKDNVDYSSVMLTSEEEIKTTNPVATEQYGVVADNLQQQNAAPIVGAVNSQGALPGMVWQNRDVYLQGPIWAKIPHTDGNFHPSPLMGGFGLKHPPPQILIKNTPVPADPPTTFNQAKLASFITQYSTGQVSVEIEWELQKENSKRWNPEIQYTSNYYKSTNVDFAVNTEGTYSEPRPIGTRYLTRNL

SEQ ID NO: 894 - protein, 738 aa, Artificial Sequence; identical to SEQ ID NO: 893
  Description of Artificial Sequence: Synthetic polypeptide

SEQ ID NO: 895 - DNA, 4472 bp, Artificial Sequence
  Description of Artificial Sequence: Synthetic polynucleotide
ctccatcactaggggtaaccgcgaagcgcctcccacgctgccgcgtcagcgctgacgtaaattacgtcataggggagtggtcctgtattagctgtcacgtgagtgcttttgcgacattttgcgacaccacgtggccattcatggtatatatggccgagtgagcgagcaggatctccattttgaccgcgaaatttgaacgagcagcagccatgccgggcttctacgagatcgtgcttaaggtgccgagcgacctggacgagcacctgccgggcatttctgactcgtttgtgaactgggtggcagagaaggaatgggagctgcccccggattctgacatggatcggaatctgattgagcaggcacccctgaccgtggccgagaagctacagcgcgacttcctggtccaatggcgccgcgtgagtaaggccccggaggccctcttctttgttcagttcgagaagggcgagtcctacttccacctccatattctggtagagaccacgggggtcaaatccatggtgctgggccgcttcctgagtcagattcgggacaagctggtgcagaccatctaccgcgggatcgagccgaccctgcccaactggttcgcggtgacaaagacgcgtaatggcgccggaggggggaacaaggtggtggacgagtgctacatccccaactacctgctgcccaagactcagcccgagctgcagtgggcgtggactaacatggaggagtatataagcgcgtgcttgaacctggccgagcgcaaacggctcgtggcgcagcacctgacccacgtcagccagacccaggagcagaacaaggagaatctgaacccgaattctgacgcgcctgtcatccggtcaaaaacctccgcgcgctacatggagctggtcgggtggctggtggaccggggcatcacctccgagaagcagtggatccaggaggaccaggcctcgtacatctccttcaacgccgcctccaactcgcggtctcagatcaaggccgcgctggacaatgccggcaagatcatggcgctgaccaaatccgcgcccgactacctggtaggccccgctctgcccgcggacattaaatccaaccgcatctaccgcatcctggagctgaatggctacgaccctgcctacgccggttccgtctttctcggctgggcccagaaaaagtttggcaaaaggaacaccatctggctgtttgggccggccaccacgggcaagaccaacatcgcggaagccatcgcccacgccgtgcccttctacggctgcgtcaactggaccaatgagaactttcccttcaacgattgcgtcgacaagatggtgatctggtgggaggagggcaagatgacggccaaggtcgtggagtccgccaaggccattctcggcggcagcaaggtgcgcgtggaccaaaagtgcaagtcgtccgcccagatcgatcccacccccgtgatcgtcacctccaacaccaacatgtgcgccgtgattgacgggaacagcaccaccttcgagcaccagcagccgttgcaggaccggatgttcaaatttgaacttacccgccgtctggagcacgactttggcaaggtgacaaagcaggaagtcaaagagttcttccgctgggcgcaggatcacgtgaccgaggtggcgcatgagttctacgtcagaaagggtggagctaacaaaagacccgcccccgatgacgcggatataagcgagcccaagcgggcctgcccctcagtcgcggatccatcgacgtcagacgcggaaggagctccggtggactttgccgacaggtaccaaaacaaatgttctcgtcacgcgggcatgcttcagatgctgtttccctgcaaaacatgcgagagaatgaatcagaatttcaacatttgcttcacgcacgggaccagagactgttcagaatgtttccctggcgtgtcagaatctcaaccggtcgtcagaaaaaagacgtatcggaaactctgtgcgattcatcatctgctggggcgggcacccgagattgcttgctcggcctgcgacctggtcaacgtggacctggatgactgtgtttctgagcaataaatgacttaaaccaggtatggctgccgatggttatcttccagattggctcgaggacaacctctctgagggcattcgcgagtggtgggacctgaaacctggagccccgaaacccaaagccaaccagcaaaagcaggacaacggccggggtctggtgcttcctggctacaagtacctcggacccttcaacggactcgacaagggggagcccgtcaacgcggcggacgcagcggccctcgagcacgacaaggcctacgaccagcagctccaagcgggtgacaatccgtacctgcggtataatcacgccgacgccgagtttcaggagcgtctgcaagaagatacgtcttttgggggcaacctcgggcgcgcagtcttccaggccaaaaagcgggttctcgaacctctgggcctggttgaatcgccggttaagacggctcctggaaagaagagaccggtagagccatcaccccagcgctctccagactcctctacgggcatcggcaagaaaggccagcagcccgcaaaaaagagactcaattttgggcagactggcgactcagagtcagtccccgaccctcaaccaatcggagaaccaccagcaggcccctctggtctgggatctggtacaatggctgcaggcggtggcgctccaatggcagacaataacgaaggcgccgacggagtgggtagttcctcaggaaattggcattgcgattccacatggctgggcgacagagtcatcaccaccagcacccgcacctgggccctgcccacctacaacaaccacctctacaagcaaatctccaacgggacctcgggaggaagcaccaacgacaacacctacttcggctacagcaccccctgggggtattttgacttcaacagattccactgccacttttcaccacgtgactggcagcgactcatcaacaacaactggggattccggcccaagaggctcaacttcaagctcttcaacatccaagtcaaggaggtcacgcagaatgaaggcaccaagaccatcgccaataaccttaccagcacgattcaggtctttacggactcggaataccagctcccgtacgtgctcggctcggcgcaccagggctgcctgcctccgttcccggcggacgtcttcatgattcctcagtacgggtacctgactctgaacaatggcagtcaggctgtgggccggtcgtccttctactgcctggagtactttccttctcaaatgctgagaacgggcaacaactttgaattcagctacaacttcgaggacgtgcccttccacagcagctacgcgcacagccagagcctggaccggctgatgaaccctctcatcgaccagtacttgtactacctgtcccggactcaaagcacgggcggtactgcaggaactcagcagttgctattttctcaggccgggcctaacaacatgtcggctcaggccaagaactggctacccggtccctgctaccggcagcaacgcgtctccacgacactgtcgcagaacaacaacagcaactttgcctggacgggtgccaccaagtatcatctgaatggcagagactctctggtgaatcctggcgttgccatggctacccacaaggacgacgaagagcgattttttccatccagcggagtcttaatgtttgggaaacagggagctggaaaagacaacgtggactatagcagcgtgatgctaaccagcgaggaagaaataaagaccaccaacccagtggccacagaacagtacggcgtggtggccgataacctgcaacagcaaaacgccgctcctattgtaggggccgtcaatagtcaaggagccttacctggcatggtgtggcagaaccgggacgtgtacctgcagggtcccatctgggccaagattcctcatacggacggcaactttcatccctcgccgctgatgggaggctttggactgaagcatccgcctcctcagatcctgattaaaaacacacctgttcccgcggatcctccgaccaccttcaatcaggccaagctggcttctttcatcacgcagtacagtaccggccaggtcagcgtggagatcgagtgggagctgcagaaggagaacagcaaacgctggaacccagagattcagtacacttccaactactacaaatctacaaatgtggactttgctgtcaatactgagggtacttattccgagcctcgccccattggcacccgttacctcacccgtaatctgtaattacatgttaatcaataaaccggttaattcgtttcagttgaactttggtctcctgtccttcttatcttatcggttaccatagaaactggttacttattaactgcttggtgcgcttcgcgataaaagacttacgtcatcgggttacccctagtgatgga

SEQ ID NO: 896 - protein, 738 aa, Artificial Sequence
  Description of Artificial Sequence: Synthetic polypeptide
MAADGYLPDWLEDNLSEGIREWWDLKPGAPKPKANQQKQDNGRGLVLPGYKYLGPFNGLDKGEPVNAADAAALEHDKAYDQQLQAGDNPYLRYNHADAEFQERLQEDTSFGGNLGRAVFQAKKRVLEPLGLVESPVKTAPGKKRPVEPSPQRSPDSSTGIGKKGQQPAKKRLNFGQTGDSESVPDPQPIGEPPAAPSGVGPNTMAAGGGAPMADNNEGADGVGSSSGNWHCDSTWLGDRVITTSTRTWALPTYNNHLYKQISNGTSGGSTNDNTYFGYSTPWGYFDFNRFHCHFSPRDWQRLINNNWGFRPKRLNFKLFNIQVKEVTQNEGTKTIANNLTSTIQVFTDSEYQLPYVLGSAHQGCLPPFPADVFMIPQYGYLTLNNGSQAVGRSSFYCLEYFPSQMLRTGNNFEFSYNFEDVPFHSSYAHSQSLDRLMNPLIDQYLYYLSRTQSTGGTAGTQQLLFSQAGPNNMSAQAKNWLPGPCYRQQRVSTTLSQNNNSNFAWTGATKYHLNGRDSLVNPGVAMATHKDDEERFFPSSGVLMFGKQGAGKDNVDYSSVMLTSEEEIKTTNPVATEQYGVVADNLQQQNAAPIVGAVNSQGALPGMVWQNRDVYLQGPIWAKIPHTDGNFHPSPLMGGFGLKHPPPQILIKNTPVPADPPTTFNQAKLASFITQYSTGQVSVEIEWELQKENSKRWNPEIQYTSNYYKSTNVDFAVNTEGTYSEPRPIGTRYLTRNL

SEQ ID NO: 897 - protein, 738 aa, Artificial Sequence
  Description of Artificial Sequence: Synthetic polypeptide
MAADGYLPDWLEDNLSEGIREWWDLKPGAPKPKANQQRQDNGRGLVLPGYRYLGPFNGLDKGEPVNAADAAALEHDRAYDQQLQAGDNPYLRYNHADAEFQERLQEDTSFGGNLGRAVFQAKKRVLEPLGLVESPVRTAPGKKRPVEPSPQRSPDSSTGIGKKGQQPARKRLNFGQTGDSESVPDPQPIGEPPAAPSGVGPNTMAAGGGAPMADNNEGADGVGSSSGNWHCDSTWLGDRVITTSTRTWALPTYNNHLYRQISNGTSGGSTNDNTYFGYSTPWGYFDFNRFHCHFSPRDWQRLINNNWGFRPKRLNFKLFNIQVKEVTQNEGTRTIANNLTSTIQVFTDSEYQLPYVLGSAHQGCLPPFPADVFMIPQYGYLTLNNGSQAVGRSSFYCLEYFPSQMLRTGNNFEFSYNFEDVPFHSSYAHSQSLDRLMNPLIDQYLYYLSRTQSTGGTAGTQQLLFSQAGPNNMSAQAKNWLPGPCYRQQRVSTTLSQNNNSNFAWTGATKYHLNGRDSLVNPGVAMATHRDDEERFFPSSGVLMFGRQGAGRDNVDYSSVMLTSEEEIRTTNPVATEQYGVVADNLQQQNAAPIVGAVNSQGALPGMVWQNRDVYLQGPIWAKIPHTDGNFHPSPLMGGFGLKHPPPQILIKNTPVPADPPTTFNQAKLASFITQYSTGQVSVEIEWELQKENSKRWNPEIQYTSNYYKSTNVDFAVNTEGTYSEPRPIGTRYLTRNL

SEQ ID NO: 898 - protein, 738 aa, Artificial Sequence
  Description of Artificial Sequence: Synthetic polypeptide
MAADGYLPDWLEDNLSEGIREWWDLKPGAPKPKANQQRQDNGRGLVLPGYRYLGPFNGLDKGEPVNAADAAALEHDRAYDQQLQAGDNPYLRYNHADAEFQERLQEDTSFGGNLGRAVFQAKKRVLEPLGLVESPVRTAPGKKRPVEPSPQRSPDSSTGIGKRGQQPARKRLNFGQTGDSESVPDPQPIGEPPAAPSGVGPNTMAAGGGAPMADNNEGADGVGSSSGNWHCDSTWLGDRVITTSTRTWALPTYNNHLYRQISNGTSGGSTNDNTYFGYSTPWGYFDFNRFHCHFSPRDWQRLINNNWGFRPKRLNFKLFNIQVKEVTQNEGTRTIANNLTSTIQVFTDSEYQLPYVLGSAHQGCLPPFPADVFMIPQYGYLTLNNGSQAVGRSSFYCLEYFPSQMLRTGNNFEFSYNFEDVPFHSSYAHSQSLDRLMNPLIDQYLYYLSRTQSTGGTAGTQQLLFSQAGPNNMSAQAKNWLPGPCYRQQRVSTTLSQNNNSNFAWTGATKYHLNGRDSLVNPGVAMATHRDDEERFFPSSGVLMFGKQGAGRDNVDYSSVMLTSEEEIRTTNPVATEQYGVVADNLQQQNAAPIVGAVNSQGALPGMVWQNRDVYLQGPIWAKIPHTDGNFHPSPLMGGFGLKHPPPQILIKNTPVPADPPTTFNQAKLASFITQYSTGQVSVEIEWELQKENSKRWNPEIQYTSNYYKSTNVDFAVNTEGTYSEPRPIGTRYLTRNL

SEQ ID NO: 899 - protein, 738 aa, Artificial Sequence
  Description of Artificial Sequence: Synthetic polypeptide
MAADGYLPDWLEDNLSEGIREWWDLKPGAPKPKANQQRQDNGRGLVLPGYRYLGPFNGLDKGEPVNAADAAALEHDRAYDQQLQAGDNPYLRYNHADAEFQERLQEDTSFGGNLGRAVFQAKKRVLEPLGLVESPVRTAPGKKRPVEPSPQRSPDSSTGIGKRGQQPAKKRLNFGQTGDSESVPDPQPIGEPPAAPSGVGPNTMAAGGGAPMADNNEGADGVGSSSGNWHCDSTWLGDRVITTSTRTWALPTYNNHLYRQISNGTSGGSTNDNTYFGYSTPWGYFDFNRFHCHFSPRDWQRLINNNWGFRPKRLNFKLFNIQVKEVTQNEGTRTIANNLTSTIQVFTDSEYQLPYVLGSAHQGCLPPFPADVFMIPQYGYLTLNNGSQAVGRSSFYCLEYFPSQMLRTGNNFEFSYNFEDVPFHSSYAHSQSLDRLMNPLIDQYLYYLSRTQSTGGTAGTQQLLFSQAGPNNMSAQAKNWLPGPCYRQQRVSTTLSQNNNSNFAWTGATKYHLNGRDSLVNPGVAMATHRDDEERFFPSSGVLMFGRQGAGRDNVDYSSVMLTSEEEIRTTNPVATEQYGVVADNLQQQNAAPIVGAVNSQGALPGMVWQNRDVYLQGPIWAKIPHTDGNFHPSPLMGGFGLKHPPPQILIKNTPVPADPPTTFNQAKLASFITQYSTGQVSVEIEWELQKENSKRWNPEIQYTSNYYKSTNVDFAVNTEGTYSEPRPIGTRYLTRNL

SEQ ID NO: 900 - protein, 738 aa, Artificial Sequence
  Description of Artificial Sequence: Synthetic polypeptide
MAADGYLPDWLEDNLSEGIREWWDLKPGAPKPKANQQRQDNGRGLVLPGYRYLGPFNGLDKGEPVNAADAAALEHDRAYDQQLQAGDNPYLRYNHADAEFQERLQEDTSFGGNLGRAVFQAKKRVLEPLGLVESPVRTAPGKKRPVEPSPQRSPDSSTGIGKRGQQPAKKRLNFGQTGDSESVPDPQPIGEPPAAPSGVGPNTMAAGGGAPMADNNEGADGVGSSSGNWHCDSTWLGDRVITTSTRTWALPTYNNHLYRQISNGTSGGSTNDNTYFGYSTPWGYFDFNRFHCHFSPRDWQRLINNNWGFRPKRLNFKLFNIQVKEVTQNEGTRTIANNLTSTIQVFTDSEYQLPYVLGSAHQGCLPPFPADVFMIPQYGYLTLNNGSQAVGRSSFYCLEYFPSQMLRTGNNFEFSYNFEDVPFHSSYAHSQSLDRLMNPLIDQYLYYLSRTQSTGGTAGTQQLLFSQAGPNNMSAQAKNWLPGPCYRQQRVSTTLSQNNNSNFAWTGATKYHLNGRDSLVNPGVAMATHRDDEERFFPSSGVLMFGKQGAGRDNVDYSSVMLTSEEEIRTTNPVATEQYGVVADNLQQQNAAPIVGAVNSQGALPGMVWQNRDVYLQGPIWAKIPHTDGNFHPSPLMGGFGLKHPPPQILIKNTPVPADPPTTFNQARLASFITQYSTGQVSVEIEWELQKENSKRWNPEIQYTSNYYKSTNVDFAVNTEGTYSEPRPIGTRYLTRNL

SEQ ID NO: 901 - protein, 738 aa, Artificial Sequence
  Description of Artificial Sequence: Synthetic polypeptide
MAADGYLPDWLEDNLSEGIREWWDLKPGAPKPKANQQRQDNGRGLVLPGYRYLGPFNGLDKGEPVNAADAAALEHDRAYDQQLQAGDNPYLRYNHADAEFQERLQEDTSFGGNLGRAVFQAKKRVLEPLGLVESPVRTAPGKKRPVEPSPQRSPDSSTGIGKKGQQPAKKRLNFGQTGDSESVPDPQPIGEPPAAPSGVGPNTMAAGGGAPMADNNEGADGVGSSSGNWHCDSTWLGDRVITTSTRTWALPTYNNHLYRQISNGTSGGSTNDNTYFGYSTPWGYFDFNRFHCHFSPRDWQRLINNNWGFRPKRLNFKLFNIQVKEVTQNEGTRTIANNLTSTIQVFTDSEYQLPYVLGSAHQGCLPPFPADVFMIPQYGYLTLNNGSQAVGRSSFYCLEYFPSQMLRTGNNFEFSYNFEDVPFHSSYAHSQSLDRLMNPLIDQYLYYLSRTQSTGGTAGTQQLLFSQAGPNNMSAQAKNWLPGPCYRQQRVSTTLSQNNNSNFAWTGATKYHLNGRDSLVNPGVAMATHRDDEERFFPSSGVLMFGRQGAGRDNVDYSSVMLTSEEEIRTTNPVATEQYGVVADNLQQQNAAPIVGAVNSQGALPGMVWQNRDVYLQGPIWAKIPHTDGNFHPSPLMGGFGLKHPPPQILIKNTPVPADPPTTFNQARLASFITQYSTGQVSVEIEWELQKENSKRWNPEIQYTSNYYKSTNVDFAVNTEGTYSEPRPIGTRYLTRNL

SEQ ID NO: 902 - DNA, 2214 bp, Artificial Sequence
  Description of Artificial Sequence: Synthetic polynucleotide
atggctgccgatggttatcttccagattggctcgaggacaacctctctgagggcattcgcgagtggtgggacctgaaacctggagccccgaaacccaaagccaaccagcaaaagcaggacaacggccggggtctggtgcttcctggctacaagtacctcggacccttcaacggactcgacaagggggagcccgtcaacgcggcggacgcagcggccctcgagcacgacaaggcctacgaccagcagctccaagcgggtgacaatccgtacctgcggtataatcacgccgacgccgagtttcaggagcgtctgcaagaagatacgtcttttgggggcaacctcgggcgcgcagtcttccaggccaaaaagcgggttctcgaacctctgggcctggttgaatcgccggttaagacggctcctggaaagaagagaccggtagagccatcaccccagcgctctccagactcctctacgggcatcggcaagaaaggccagcagcccgcaaaaaagagactcaattttgggcagactggcgactcagagtcagtccccgaccctcaaccaatcggagaaccaccagcagccccctctggtgtgggacctaatacaatggctgcaggcggtggcgctccaatggcagacaataacgaaggcgccgacggagtgggtagttcctcaggaaattggcattgcgattccacatggctgggcgacagagtcatcaccaccagcacccgcacctgggccctgcccacctacaacaaccacctctacaagcaaatctccaacgggacctcgggaggaagcaccaacgacaacacctacttcggctacagcaccccctgggggtattttgacttcaacagattccactgccacttttcaccacgtgactggcagcgactcatcaacaacaactggggattccggcccaagaggctcaacttcaagctcttcaacatccaagtcaaggaggtcacgcagaatgaaggcaccaagaccatcgccaataaccttaccagcacgattcaggtctttacggactcggaataccagctcccgtacgtgctcggctcggcgcaccagggctgcctgcctccgttcccggcggacgtcttcatgattcctcagtacgggtacctgactctgaacaatggcagtcaggctgtgggccggtcgtccttctactgcctggagtactttccttctcaaatgctgagaacgggcaacaactttgaattcagctacaacttcgaggacgtgcccttccacagcagctacgcgcacagccagagcctggaccggctgatgaaccctctcatcgaccagtacttgtactacctgtcccggactcaaagcacgggcggtactgcaggaactcagcagttgctattttctcaggccgggcctaacaacatgtcggctcaggccaagaactggctacccggtccctgctaccggcagcaacgcgtctccacgacactgtcgcagaacaacaacagcaactttgcctggacgggtgccaccaagtatcatctgaatggcagagactctctggtgaatcctggcgttgccatggctacccacaaggacgacgaagagcgattttttccatccagcggagtcttaatgtttgggaaacagggagctggaaaagacaacgtggactatagcagcgtgatgctaaccagcgaggaagaaataaagaccaccaacccagtggccacagaacagtacggcgtggtggccgataacctgcaacagcaaaacgccgctcctattgtaggggccgtcaatagtcaaggagccttacctggcatggtgtggcagaaccgggacgtgtacctgcagggtcccatctgggccaagattcctcatacggacggcaactttcatccctcgccgctgatgggaggctttggactgaagcatccgcctcctcagatcctgattaaaaacacacctgttcccgcggatcctccgaccaccttcaatcaggccaagctggcttctttcatcacgcagtacagtaccggccaggtcagcgtggagatcgagtgggagctgcagaaggagaacagcaaacgctggaacccagagattcagtacacttccaactactacaaatctacaaatgtggactttgctgtcaatactgagggtacttattccgagcctcgccccattggcacccgttacctcacccgtaatctg

SEQ ID NO: 903 - DNA, 2217 bp, Artificial Sequence
  Description of Artificial Sequence: Synthetic polynucleotide
atggctgccgatggttatcttccagattggctcgaggacaacctctctgagggcattcgcgagtggtgggacctgaaacctggagccccgaaacccaaagccaaccagcaaaggcaggacaacggccggggtctggtgcttcctggctacaggtacctcggacccttcaacggactcgacaagggggagcccgtcaacgcggcggacgcagcggccctcgagcacgacagggcctacgaccagcagctccaagcgggtgacaatccgtacctgcggtataatcacgccgacgccgagtttcaggagcgtctgcaagaagatacgtcttttgggggcaacctcgggcgcgcagtcttccaggccaaaaagcgggttctcgaacctctgggcctggttgaatcgccggttaggacggctcctggaaagaagagaccggtagagccatcaccccagcgctctccagactcctctacgggcatcggcaagaaaggccagcagcccgcaagaaagagactcaattttgggcagactggcgactcagagtcagtccccgaccctcaaccaatcggagaaccaccagcagccccctctggtgtgggacctaatacaatggctgcaggcggtggcgctccaatggcagacaataacgaaggcgccgacggagtgggtagttcctcaggaaattggcattgcgattccacatggctgggcgacagagtcatcaccaccagcacccgcacctgggccctgcccacctacaacaaccacctctacaggcaaatctccaacgggacctcgggaggaagcaccaacgacaacacctacttcggctacagcaccccctgggggtattttgacttcaacagattccactgccacttttcaccacgtgactggcagcgactcatcaacaacaactggggattccggcccaagaggctcaacttcaagctcttcaacatccaagtcaaggaggtcacgcagaatgaaggcaccaggaccatcgccaataaccttaccagcacgattcaggtctttacggactcggaataccagctcccgtacgtgctcggctcggcgcaccagggctgcctgcctccgttcccggcggacgtcttcatgattcctcagtacgggtacctgactctgaacaatggcagtcaggctgtgggccggtcgtccttctactgcctggagtactttccttctcaaatgctgagaacgggcaacaactttgaattcagctacaacttcgaggacgtgcccttccacagcagctacgcgcacagccagagcctggaccggctgatgaaccctctcatcgaccagtacttgtactacctgtcccggactcaaagcacgggcggtactgcaggaactcagcagttgctattttctcaggccgggcctaacaacatgtcggctcaggccaagaactggctacccggtccctgctaccggcagcaacgcgtctccacgacactgtcgcagaacaacaacagcaactttgcctggacgggtgccaccaagtatcatctgaatggcagagactctctggtgaatcctggcgttgccatggctacccacagggacgacgaagagcgattttttccatccagcggagtcttaatgtttgggagacagggagctggaagagacaacgtggactatagcagcgtgatgctaaccagcgaggaagaaataaggaccaccaacccagtggccacagaacagtacggcgtggtggccgataacctgcaacagcaaaacgccgctcctattgtaggggccgtcaatagtcaaggagccttacctggcatggtgtggcagaaccgggacgtgtacctgcagggtcccatctgggccaagattcctcatacggacggcaactttcatccctcgccgctgatgggaggctttggactgaagcatccgcctcctcagatcctgattaaaaacacacctgttcccgcggatcctccgaccaccttcaatcaggccaagctggcttctttcatcacgcagtacagtaccggccaggtcagcgtggagatcgagtgggagctgcagaaggagaacagcaaacgctggaacccagagattcagtacacttccaactactacaaatctacaaatgtggactttgctgtcaatactgagggtacttattccgagcctcgccccattggcacccgttacctcacccgtaatctgtaa

SEQ ID NO: 904 - DNA, 2217 bp, Artificial Sequence
  Description of Artificial Sequence: Synthetic polynucleotide
atggctgccgatggttatcttccagattggctcgaggacaacctctctgagggcattcgcgagtggtgggacctgaaacctggagccccgaaacccaaagccaaccagcaaaggcaggacaacggccggggtctggtgcttcctggctacaggtacctcggacccttcaacggactcgacaagggggagcccgtcaacgcggcggacgcagcggccctcgagcacgacagggcctacgaccagcagctccaagcgggtgacaatccgtacctgcggtataatcacgccgacgccgagtttcaggagcgtctgcaagaagatacgtcttttgggggcaacctcgggcgcgcagtcttccaggccaaaaagcgggttctcgaacctctgggcctggttgaatcgccggttaggacggctcctggaaagaagagaccggtagagccatcaccccagcgctctccagactcctctacgggcatcggcaagagaggccagcagcccgcaagaaagagactcaattttgggcagactggcgactcagagtcagtccccgaccctcaaccaatcggagaaccaccagcagccccctctggtgtgggacctaatacaatggctgcaggcggtggcgctccaatggcagacaataacgaaggcgccgacggagtgggtagttcctcaggaaattggcattgcgattccacatggctgggcgacagagtcatcaccaccagcacccgcacctgggccctgcccacctacaacaaccacctctacaggcaaatctccaacgggacctcgggaggaagcaccaacgacaacacctacttcggctacagcaccccctgggggtattttgacttcaacagattccactgccacttttcaccacgtgactggcagcgactcatcaacaacaactggggattccggcccaagaggctcaacttcaagctcttcaacatccaagtcaaggaggtcacgcagaatgaaggcaccaggaccatcgccaataaccttaccagcacgattcaggtctttacggactcggaataccagctcccgtacgtgctcggctcggcgcaccagggctgcctgcctccgttcccggcggacgtcttcatgattcctcagtacgggtacctgactctgaacaatggcagtcaggctgtgggccggtcgtccttctactgcctggagtactttccttctcaaatgctgagaacgggcaacaactttgaattcagctacaacttcgaggacgtgcccttccacagcagctacgcgcacagccagagcctggaccggctgatgaaccctctcatcgaccagtacttgtactacctgtcccggactcaaagcacgggcggtactgcaggaactcagcagttgctattttctcaggccgggcctaacaacatgtcggctcaggccaagaactggctacccggtccctgctaccggcagcaacgcgtctccacgacactgtcgcagaacaacaacagcaactttgcctggacgggtgccaccaagtatcatctgaatggcagagactctctggtgaatcctggcgttgccatggctacccacagggacgacgaagagcgattttttccatccagcggagtcttaatgtttgggaaacagggagctggaagagacaacgtggactatagcagcgtgatgctaaccagcgaggaagaaataaggaccaccaacccagtggccacagaacagtacggcgtggtggccgataacctgcaacagcaaaacgccgctcctattgtaggggccgtcaatagtcaaggagccttacctggcatggtgtggcagaaccgggacgtgtacctgcagggtcccatctgggccaagattcctcatacggacggcaactttcatccctcgccgctgatgggaggctttggactgaagcatccgcctcctcagatcctgattaaaaacacacctgttcccgcggatcctccgaccaccttcaatcaggccaagctggcttctttcatcacgcagtacagtaccggccaggtcagcgtggagatcgagtgggagctgcagaaggagaacagcaaacgctggaacccagagattcagtacacttccaactactacaaatctacaaatgtggactttgctgtcaatactgagggtacttattccgagcctcgccccattggcacccgttacctcacccgtaatctgtaa

SEQ ID NO: 905 - DNA, 2217 bp, Artificial Sequence
  Description of Artificial Sequence: Synthetic polynucleotide
atggctgccgatggttatcttccagattggctcgaggacaacctctctgagggcattcgcgagtggtgggacctgaaacctggagccccgaaacccaaagccaaccagcaaaggcaggacaacggccggggtctggtgcttcctggctacaggtacctcggacccttcaacggactcgacaagggggagcccgtcaacgcggcggacgcagcggccctcgagcacgacagggcctacgaccagcagctccaagcgggtgacaatccgtacctgcggtataatcacgccgacgccgagtttcaggagcgtctgcaagaagatacgtcttttgggggcaacctcgggcgcgcagtcttccaggccaaaaagcgggttctcgaacctctgggcctggttgaatcgccggttaggacggctcctggaaagaagagaccggtagagccatcaccccagcgctctccagactcctctacgggcatcggcaagagaggccagcagcccgcaaaaaagagactcaattttgggcagactggcgactcagagtcagtccccgaccctcaaccaatcggagaaccaccagcagccccctctggtgtgggacctaatacaatggctgcaggcggtggcgctccaatggcagacaataacgaaggcgccgacggagtgggtagttcctcaggaaattggcattgcgattccacatggctgggcgacagagtcatcaccaccagcacccgcacctgggccctgcccacctacaacaaccacctctacaggcaaatctccaacgggacctcgggaggaagcaccaacgacaacacctacttcggctacagcaccccctgggggtattttgacttcaacagattccactgccacttttcaccacgtgactggcagcgactcatcaacaacaactggggattccggcccaagaggctcaacttcaagctcttcaacatccaagtcaaggaggtcacgcagaatgaaggcaccaggaccatcgccaataaccttaccagcacgattcaggtctttacggactcggaataccagctcccgtacgtgctcggctcggcgcaccagggctgcctgcctccgttcccggcggacgtcttcatgattcctcagtacgggtacctgactctgaacaatggcagtcaggctgtgggccggtcgtccttctactgcctggagtactttccttctcaaatgctgagaacgggcaacaactttgaattcagctacaacttcgaggacgtgcccttccacagcagctacgcgcacagccagagcctggaccggctgatgaaccctctcatcgaccagtacttgtactacctgtcccggactcaaagcacgggcggtactgcaggaactcagcagttgctattttctcaggccgggcctaacaacatgtcggctcaggccaagaactggctacccggtccctgctaccggcagcaacgcgtctccacgacactgtcgcagaacaacaacagcaactttgcctggacgggtgccaccaagtatcatctgaatggcagagactctctggtgaatcctggcgttgccatggctacccacagggacgacgaagagcgattttttccatccagcggagtcttaatgtttgggagacagggagctggaagagacaacgtggactatagcagcgtgatgctaaccagcgaggaagaaataaggaccaccaacccagtggccacagaacagtacggcgtggtggccgataacctgcaacagcaaaacgccgctcctattgtaggggccgtcaatagtcaaggagccttacctggcatggtgtggcagaaccgggacgtgtacctgcagggtcccatctgggccaagattcctcatacggacggcaactttcatccctcgccgctgatgggaggctttggactgaagcatccgcctcctcagatcctgattaaaaacacacctgttcccgcggatcctccgaccaccttcaatcaggccaagctggcttctttcatcacgcagtacagtaccggccaggtcagcgtggagatcgagtgggagctgcagaaggagaacagcaaacgctggaacccagagattcagtacacttccaactactacaaatctacaaatgtggactttgctgtcaatactgagggtacttattccgagcctcgccccattggcacccgttacctcacccgtaatctgtaa

SEQ ID NO: 906 - DNA, 2217 bp, Artificial Sequence
  Description of Artificial Sequence: Synthetic polynucleotide
atggctgccgatggttatcttccagattggctcgaggacaacctctctgagggcattcgcgagtggtgggacctgaaacctggagccccgaaacccaaagccaaccagcaaaggcaggacaacggccggggtctggtgcttcctggctacaggtacctcggacccttcaacggactcgacaagggggagcccgtcaacgcggcggacgcagcggccctcgagcacgacagggcctacgaccagcagctccaagcgggtgacaatccgtacctgcggtataatcacgccgacgccgagtttcaggagcgtctgcaagaagatacgtcttttgggggcaacctcgggcgcgcagtcttccaggccaaaaagcgggttctcgaacctctgggcctggttgaatcgccggttaggacggctcctggaaagaagagaccggtagagccatcaccccagcgctctccagactcctctacgggcatcggcaagagaggccagcagcccgcaaaaaagagactcaattttgggcagactggcgactcagagtcagtccccgaccctcaaccaatcggagaaccaccagcagccccctctggtgtgggacctaatacaatggctgcaggcggtggcgctccaatggcagacaataacgaaggcgccgacggagtgggtagttcctcaggaaattggcattgcgattccacatggctgggcgacagagtcatcaccaccagcacccgcacctgggccctgcccacctacaacaaccacctctacaggcaaatctccaacgggacctcgggaggaagcaccaacgacaacacctacttcggctacagcaccccctgggggtattttgacttcaacagattccactgccacttttcaccacgtgactggcagcgactcatcaacaacaactggggattccggcccaagaggctcaacttcaagctcttcaacatccaagtcaaggaggtcacgcagaatgaaggcaccaggaccatcgccaataaccttaccagcacgattcaggtctttacggactcggaataccagctcccgtacgtgctcggctcggcgcaccagggctgcctgcctccgttcccggcggacgtcttcatgattcctcagtacgggtacctgactctgaacaatggcagtcaggctgtgggccggtcgtccttctactgcctggagtactttccttctcaaatgctgagaacgggcaacaactttgaattcagctacaacttcgaggacgtgcccttccacagcagctacgcgcacagccagagcctggaccggctgatgaaccctctcatcgaccagtacttgtactacctgtcccggactcaaagcacgggcggtactgcaggaactcagcagttgctattttctcaggccgggcctaacaacatgtcggctcaggccaagaactggctacccggtccctgctaccggcagcaacgcgtctccacgacactgtcgcagaacaacaacagcaactttgcctggacgggtgccaccaagtatcatctgaatggcagagactctctggtgaatcctggcgttgccatggctacccacagggacgacgaagagcgattttttccatccagcggagtcttaatgtttgggaaacagggagctggaagagacaacgtggactatagcagcgtgatgctaaccagcgaggaagaaataaggaccaccaacccagtggccacagaacagtacggcgtggtggccgataacctgcaacagcaaaacgccgctcctattgtaggggccgtcaatagtcaaggagccttacctggcatggtgtggcagaaccgggacgtgtacctgcagggtcccatctgggccaagattcctcatacggacggcaactttcatccctcgccgctgatgggaggctttggactgaagcatccgcctcctcagatcctgattaaaaacacacctgttcccgcggatcctccgaccaccttcaatcaggccaggctggcttctttcatcacgcagtacagtaccggccaggtcagcgtggagatcgagtgggagctgcagaaggagaacagcaaacgctggaacccagagattcagtacacttccaactactacaaatctacaaatgtggactttgctgtcaatactgagggtacttattccgagcctcgccccattggcacccgttacctcacccgtaatctgtaa

SEQ ID NO: 907 - DNA, 2217 bp, Artificial Sequence
  Description of Artificial Sequence: Synthetic polynucleotide
atggctgccgatggttatcttccagattggctcgaggacaacctctctgagggcattcgcgagtggtgggacctgaaacctggagccccgaaacccaaagccaaccagcaaaggcaggacaacggccggggtctggtgcttcctggctacaggtacctcggacccttcaacggactcgacaagggggagcccgtcaacgcggcggacgcagcggccctcgagcacgacagggcctacgaccagcagctccaagcgggtgacaatccgtacctgcggtataatcacgccgacgccgagtttcaggagcgtctgcaagaagatacgtcttttgggggcaacctcgggcgcgcagtcttccaggccaaaaagcgggttctcgaacctctgggcctggttgaatcgccggttaggacggctcctggaaagaagagaccggtagagccatcaccccagcgctctccagactcctctacgggcatcggcaagaaaggccagcagcccgcaaaaaagagactcaattttgggcagactggcgactcagagtcagtccccgaccctcaaccaatcggagaaccaccagcagccccctctggtgtgggacctaatacaatggctgcaggcggtggcgctccaatggcagacaataacgaaggcgccgacggagtgggtagttcctcaggaaattggcattgcgattccacatggctgggcgacagagtcatcaccaccagcacccgcacctgggccctgcccacctacaacaaccacctctacaggcaaatctccaacgggacctcgggaggaagcaccaacgacaacacctacttcggctacagcaccccctgggggtattttgacttcaacagattccactgccacttttcaccacgtgactggcagcgactcatcaacaacaactggggattccggcccaagaggctcaacttcaagctcttcaacatccaagtcaaggaggtcacgcagaatgaaggcaccaggaccatcgccaataaccttaccagcacgattcaggtctttacggactcggaataccagctcccgtacgtgctcggctcggcgcaccagggctgcctgcctccgttcccggcggacgtcttcatgattcctcagtacgggtacctgactctgaacaatggcagtcaggctgtgggccggtcgtccttctactgcctggagtactttccttctcaaatgctgagaacgggcaacaactttgaattcagctacaacttcgaggacgtgcccttccacagcagctacgcgcacagccagagcctggaccggctgatgaaccctctcatcgaccagtacttgtactacctgtcccggactcaaagcacgggcggtactgcaggaactcagcagttgctattttctcaggccgggcctaacaacatgtcggctcaggccaagaactggctacccggtccctgctaccggcagcaacgcgtctccacgacactgtcgcagaacaacaacagcaactttgcctggacgggtgccaccaagtatcatctgaatggcagagactctctggtgaatcctggcgttgccatggctacccacagggacgacgaagagcgattttttccatccagcggagtcttaatgtttgggagacagggagctggaagagacaacgtggactatagcagcgtgatgctaaccagcgaggaagaaataaggaccaccaacccagtggccacagaacagtacggcgtggtggccgataacctgcaacagcaaaacgccgctcctattgtaggggccgtcaatagtcaaggagccttacctggcatggtgtggcagaaccgggacgtgtacctgcagggtcccatctgggccaagattcctcatacggacggcaactttcatccctcgccgctgatgggaggctttggactgaagcatccgcctcctcagatcctgattaaaaacacacctgttcccgcggatcctccgaccaccttcaatcaggccaggctggcttctttcatcacgcagtacagtaccggccaggtcagcgtggagatcgagtgggagctgcagaaggagaacagcaaacgctggaacccagagattcagtacacttccaactactacaaatctacaaatgtggactttgctgtcaatactgagggtacttattccgagcctcgccccattggcacccgttacctcacccgtaatctgtaa

SEQ ID NO: 908 - protein, 744 aa, Artificial Sequence
  Description of Artificial Sequence: Synthetic polypeptide
MAADGYLPDWLEDTLSEGIRQWWKLKPGPPPPKPAERHKDDSRGLVLPGYKYLGPFNGLDKGEPVNEADAAALEHDKAYDRQLDSGDNPYLKYNHADAEFQERLKEDTSFGGNLGRAVFQAKKRVLEPLGLVEEPVKTAPGKKRPVEHSPVEPDSSSGTGKAGQQPARKRLNFGQTGDADSVPDPQPLGQPPAAPSGLGTNTMATGSGAPMADNNEGADGVGNSSGNWHCDSTWMGDRVITTSTRTWALPTYNNHLYKQISSQSGASNDNHYFGYSTPWGYFDFNRFHCHFSPRDWQRLINNNWGFRPKRLNFKLFNIQVKEVTQNDGTTTIANNLTSTVQVFTDSEYQLPYVLGSAHQGCLPPFPADVFMVPQYGYLTLNNGSQAVGRSSFYCLEYFPSQMLRTGNNFTFSYTFEDVPFHSSYAHSQSLDRLMNPLIDQYLYYLSRTNTPSGTTTQSRLQFSQAGASDIRDQSRNWLPGPCYRQQRVSKTSADNNNSEYSWTGATKYHLNGRDSLVNPGPAMASHKDDEEKFFPQSGVLIFGKQGSEKTNVDIEKVMITDEEEIRTTNPVATEQYGSVSTNLQRGQRGESGHGYFAQAATADVNTQGVLPGMVWQDRDVYLQGPIWAKIPHTDGHFHPSPLMGGFGLKHPPPQILIKNTPVPANPSTTFSAAKFASFITQYSTGQVSVEIEWELQKENSKRWNPEIQYTSNYNKSVNVDFTVDTNGVYSEPRPIGTRYLTRNL

SEQ ID NO: 909 - DNA, 8359 bp, Artificial Sequence
  Description of Artificial Sequence: Synthetic polynucleotide
catcatcaataatataccttattttggattgaagccaatatgataatgagggggtggagtttgtgacgtggcgcggggcgtgggaacggggcgggtgacgtagtagctctagaggtcctgtattagaggtcacgtgagtgttttgcgacattttgcgacaccatgtggtcacgctgggtatttaagcccgagtgagcacgcagggtctccattttgaagcgggaggtttgaacgcgcagccgccatgccggggttttacgagattgtgattaaggtccccagcgaccttgacgagcatctgcccggcatttctgacagctttgtgaactgggtggccgagaaggaatgggagttgccgccagattctgacatggatctgaatctgattgagcaggcacccctgaccgtggccgagaagctgcagcgcgactttctgacggaatggcgccgtgtgagtaaggcaccggaggcccttttctttgtgcaatttgagaagggagagagctacttccacatgcacgtgctcgtggaaaccaccggggtgaaatccatggttttgggacgtttcctgagtcagattcgcgaaaaactgattcagagaatttaccgcgggatcgagccgactttgccaaactggttcgcggtcacaaagaccagaaatggcgccggaggcgggaacaaggtggtggatgagtgctacatccccaattacttgctccccaaaacccagcctgagctccagtgggcgtggactaatatggaacagtatttaagcgcctgtttgaatctcacggagcgtaaacggttggtggcgcagcatctgacgcacgtgtcgcagacgcaggagcagaacaaagagaatcagaatcccaattctgatgcgccggtgatcagatcaaaaacttcagccaggtacatggagctggtcgggtggctcgtggacaaggggattacctcggagaagcagtggatccaggaggaccaggcctcatacatctccttcaatgcggcctccaactcgcggtcccaaatcaaggctgccttggacaatgcgggaaagattatgagcctgactaaaaccgcccccgactacctggtgggccagcagcccgtggaggacatttccagcaatcggatttataaaattttggaactaaacgggtacgatccccaatatgcggcttccgtctttctgggatgggccacgaaaaagttcggcaagaggaacaccatctggctgtttgggcctgcaactaccgggaagaccaacatcgcggaggccatagcccacactgtgcccttctacgggtgcgtaaactggaccaatgagaactttcccttcaacgactgtgtcgacaagatggtgatctggtgggaggaggggaagatgaccgccaaggtcgtggagtcggccaaagccattctcggaggaagcaaggtgcgcgtggaccagaaatgcaagtcctcggcccagatagacccgactcccgtgatcgtcacctccaacaccaacatgtgcgccgtgattgacgggaactcaacgaccttcgaacaccagcagccgttgcaagaccggatgttcaaatttgaactcacccgccgtctggatcatgactttgggaaggtcaccaagcaggaagtcaaagactttttccggtgggcaaaggatcacgtggttgaggtggagcatgaattctacgtcaaaaagggtggagccaagaaaagacccgcccccagtgacgcagatataagtgagcccaaacgggtgcgcgagtcagttgcgcagccatcgacgtcagacgcggaagcttcgatcaactacgcagacaggtaccaaaacaaatgttctcgtcacgtgggcatgaatctgatgctgtttccctgcagacaatgcgagagaatgaatcagaattcaaatatctgcttcactcacggacagaaagactgtttagagtgctttcccgtgtcagaatctcaacccgtttctgtcgtcaaaaaggcgtatcagaaactgtgctacattcatcatatcatgggaaaggtgccagacgcttgcactgcctgcgatctggtcaatgtggatttggatgactgcatctttgaacaataaatgatttaaatcaggtatggctgccgatggttatcttccagattggctcgaggacactctctctgaaggaataagacagtggtggaagctcaaacctggcccaccaccaccaaagcccgcagagcggcataaggacgacagcaggggtcttgtgcttcctgggtacaagtacctcggacccttcaacggactcgacaagggagagccggtcaacgaggcagacgccgcggccctcgagcacgacaaagcctacgaccggcagctcgacagcggagacaacccgtacctcaagtacaaccacgccgacgcggagtttcaggagcgccttaaagaagatacgtcttttgggggcaacctcggacgagcagtcttccaggcgaaaaagagggttcttgaacctctgggcctggttgaggaacctgttaagacggctccgggaaaaaagaggccggtagagcactctcctgtggagccagactcctcctcgggaaccggaaaggcgggccagcagcctgcaagaaaaagattgaattttggtcagactggagacgcagactcagtacctgacccccagcctctcggacagccaccagcagccccctctggtctgggaactaatacgatggctacaggcagtggcgcaccaatggcagacaataacgagggcgccgacggagtgggtaattcctcgggaaattggcattgcgattccacatggatgggcgacagagtcatcaccaccagcacccgaacctgggccctgcccacctacaacaaccacctctacaaacaaatttccagccaatcaggagcctcgaacgacaatcactactttggctacagcaccccttgggggtattttgacttcaacagattccactgccacttttcaccacgtgactggcaaagactcatcaacaacaactggggattccgacccaagagactcaacttcaagctctttaacattcaagtcaaagaggtcacgcagaatgacggtacgacgacgattgccaataaccttaccagcacggttcaggtgtttactgactcggagtaccagctcccgtacgtcctcggctcggcgcatcaaggatgcctcccgccgttcccagcagacgtcttcatggtgccacagtatggatacctcaccctgaacaacgggagtcaggcagtaggacgctcttcattttactgcctggagtactttccttctcagatgctgcgtaccggaaacaactttaccttcagctacacttttgaggacgttcctttccacagcagctacgctcacagccagagtctggaccgtctcatgaatcctctcatcgaccagtacctgtattacttgagcagaacaaacactccaagtggaaccaccacgcagtcaaggcttcagttttctcaggccggagcgagtgacattcgggaccagtctaggaactggcttcctggaccctgttaccgccagcagcgagtatcaaagacatctgcggataacaacaacagtgaatactcgtggactggagctaccaagtaccacctcaatggcagagactctctggtgaatccgggcccggccatggcaagccacaaggacgatgaagaaaagttttttcctcagagcggggttctcatctttgggaagcaaggctcagagaaaacaaatgtggacattgaaaaggtcatgattacagacgaagaggaaatcaggacaaccaatcccgtggctacggagcagtatggttctgtatctaccaacctccagagaggccagagaggcgagtctggtcatggttattttgcccaggcggccaccgcagatgtcaacacacaaggcgttcttccaggcatggtctggcaggacagagatgtgtaccttcaggggcccatctgggcaaagattccacacacggacggacattttcacccctctcccctcatgggtggattcggacttaaacaccctcctccacagattctcatcaagaacaccccggtacctgcgaatccttcgaccaccttcagtgcggcaaagtttgcttccttcatcacacagtactccacgggacaggtcagcgtggagatcgagtgggagctgcagaaggaaaacagcaaacgctggaatcccgaaattcagtacacttccaactacaacaagtctgttaatgtggactttactgtggacactaatggcgtgtattcagagcctcgccccattggcaccagatacctgactcgtaatctgtaattgcttgttaatcaataaaccgtttaattcgtttcagttgaactttggtctctgcgtatttctttcttatctagtttccatgctctagaggtcctgtattagaggtcacgtgagtgttttgcgacattttgcgacaccatgtggtcacgctgggtatttaagcccgagtgagcacgcagggtctccattttgaagcgggaggtttgaacgcgcagccaccacggcggggttttacgagattgtgattaaggtccccagcgaccttgacgagcatctgcccggcatttctgacagctttgtgaactgggtggccgagaaggaatgggagttgccgccagattctgacatggatctgaatctgattgagcaggcacccctgaccgtggccgagaagctgcatcgctggcgtaatagcgaagaggcccgcaccgatcgcccttcccaacagttgcgcagcctgaatggcgaatggcgattccgttgcaatggctggcggtaatattgttctggatattaccagcaaggccgatagtttgagttcttctactcaggcaagtgatgttattactaatcaaagaagtattgcgacaacggttaatttgcgtgatggacagactcttttactcggtggcctcactgattataaaaacacttctcaggattctggcgtaccgttcctgtctaaaatccctttaatcggcctcctgtttagctcccgctctgattctaacgaggaaagcacgttatacgtgctcgtcaaagcaaccatagtacgcgccctgtagcggcgcattaagcgcggcgggtgtggtggttacgcgcagcgtgaccgctacacttgccagcgccctagcgcccgctcctttcgctttcttcccttcctttctcgccacgttcgccggctttccccgtcaagctctaaatcgggggctccctttagggttccgatttagtgctttacggcacctcgaccccaaaaaacttgattagggtgatggttcacgtagtgggccatcgccctgatagacggtttttcgccctttgacgttggagtccacgttctttaatagtggactcttgttccaaactggaacaacactcaaccctatctcggtctattcttttgatttataagggattttgccgatttcggcctattggttaaaaaatgagctgatttaacaaaaatttaacgcgaattttaacaaaatattaacgtttacaatttaaatatttgcttatacaatcttcctgtttttggggcttttctgattatcaaccggggtacatatgattgacatgctagttttacgattaccgttcatcgattctcttgtttgctccagactctcaggcaatgacctgatagcctttgtagagacctctcaaaaatagctaccctctccggcatgaatttatcagctagaacggttgaatatcatattgatggtgatttgactgtctccggcctttctcacccgtttgaatctttacctacacattactcaggcattgcatttaaaatatatgagggttctaaaaatttttatccttgcgttgaaataaaggcttctcccgcaaaagtattacagggtcataatgtttttggtacaaccgatttagctttatgctctgaggctttattgcttaattttgctaattctttgccttgcctgtatgatttattggatgttggaattcctgatgcggtattttctccttacgcatctgtgcggtatttcacaccgcatatggtgcactctcagtacaatctgctctgatgccgcatagttaagccagccccgacacccgccaacacccgctgacgcgccctgacgggcttgtctgctcccggcatccgcttacagacaagctgtgaccgtctccgggagctgcatgtgtcagaggttttcaccgtcatcaccgaaacgcgcgagacgaaagggcctcgtgatacgcctatttttataggttaatgtcatgataataatggtttcttagacgtcaggtggcacttttcggggaaatgtgcgcggaacccctatttgtttatttttctaaatacattcaaatatgtatccgctcatgagacaataaccctgataaatgcttcaataatattgaaaaaggaagagtatgagtattcaacatttccgtgtcgcccttattcccttttttgcggcattttgccttcctgtttttgctcacccagaaacgctggtgaaagtaaaagatgctgaagatcagttgggtgcacgagtgggttacatcgaactggatctcaacagcggtaagatccttgagagttttcgccccgaagaacgttttccaatgatgagcacttttaaagttctgctatgtggcgcggtattatcccgtattgacgccgggcaagagcaactcggtcgccgcatacactattctcagaatgacttggttgagtactcaccagtcacagaaaagcatcttacggatggcatgacagtaagagaattatgcagtgctgccataaccatgagtgataacactgcggccaacttacttctgacaacgatcggaggaccgaaggagctaaccgcttttttgcacaacatgggggatcatgtaactcgccttgatcgttgggaaccggagctgaatgaagccataccaaacgacgagcgtgacaccacgatgcctgtagcaatggcaacaacgttgcgcaaactattaactggcgaactacttactctagcttcccggcaacaattaatagactggatggaggcggataaagttgcaggaccacttctgcgctcggcccttccggctggctggtttattgctgataaatctggagccggtgagcgtgggtctcgcggtatcattgcagcactggggccagatggtaagccctcccgtatcgtagttatctacacgacggggagtcaggcaactatggatgaacgaaatagacagatcgctgagataggtgcctcactgattaagcattggtaactgtcagaccaagtttactcatatatactttagattgatttaaaacttcatttttaatttaaaaggatctaggtgaagatcctttttgataatctcatgaccaaaatcccttaacgtgagttttcgttccactgagcgtcagaccccgtagaaaagatcaaaggatcttcttgagatcctttttttctgcgcgtaatctgctgcttgcaaacaaaaaaaccaccgctaccagcggtggtttgtttgccggatcaagagctaccaactctttttccgaaggtaactggcttcagcagagcgcagataccaaatactgtccttctagtgtagccgtagttaggccaccacttcaagaactctgtagcaccgcctacatacctcgctctgctaatcctgttaccagtggctgctgccagtggcgataagtcgtgtcttaccgggttggactcaagacgatagttaccggataaggcgcagcggtcgggctgaacggggggttcgtgcacacagcccagcttggagcgaacgacctacaccgaactgagatacctacagcgtgagctatgagaaagcgccacgcttcccgaagggagaaaggcggacaggtatccggtaagcggcagggtcggaacaggagagcgcacgagggagcttccagggggaaacgcctggtatctttatagtcctgtcgggtttcgccacctctgacttgagcgtcgatttttgtgatgctcgtcaggggggcggagcctatggaaaaacgccagcaacgcggcctttttacggttcctggccttttgctggccttttgctcacatgttctttcctgcgttatcccctgattctgtggataaccgtattaccgcctttgagtgagctgataccgctcgccgcagccgaacgaccgagcgcagcgagtcagtgagcgaggaagcggaagagcgcccaatacgcaaaccgcctctccccgcgcgttggccgattcattaatgcagaattcc

SEQ ID NO: 910 - protein, 736 aa, Artificial Sequence
  Description of Artificial Sequence: Synthetic polypeptide
MAADGYLPDWLEDNLSEGIREWWDLKPGAPKPKANQQKQDDGRGLVLPGYKYLGPFNGLDKGEPVNAADAAALEHDKAYDQQLKAGDNPYLRYNHADAEFQERLQEDTSFGGNLGRAVFQAKKRVLEPLGLVEEGAKTAPGKKRPVEQSPQEPDSSSGIGKKGQQPAKKRLNFGQTGDSESVPDPQPLGEPPAAPSGVGSNTMAAGGGAPMADNNEGADGVGNASGNWHCDSTWLGDRVITTSTRTWALPTYNNHLYKQISSQSGASTNDNTYFGYSTPWGYFDFNRFHCHFSPRDWQRLINNNWGFRPKRLNFKLFNIQVKEVTTNDGTTTIANNLTSTVQVFTDSEYQLPYVLGSAHQGCLPPFPADVFMIPQYGYLTLNNGSQAVGRSSFYCLEYFPSQMLRTGNNFEFSYTFEDVPFHSSYAHSQSLDRLMNPLIDQYLYYLSRTQTTSGTAGNRTLQFSQAGPSSMANQAKNWLPGPCYRQQRVSKTANQNNNSNFAWTGATKYHLNGRDSLVNPGPAMATHKDDEDKFFPMSGVLIFGKQGAGNSNVDLDNVMITSEEEIKTTNPVATEQYGTVATNLQSSNTAPATGTVNSQGALPGMVWQNRDVYLQGPIWAKIPHTDGHFHPSPLMGGFGLKHPPPQILIKNTPVPANPPTTFSPAKFASFITQYSTGQVSVEIEWELQKENSKRWNPEIQYTSNYNKSTNVDFAVDTNGVYSEPRPIGTRYLTRNL

SEQ ID NO: 911 - DNA, 2208 bp, Artificial Sequence
  Description of Artificial Sequence: Synthetic polynucleotide
atggctgccgatggttatcttccagattggctcgaggacaacctctctgagggcattcgcgagtggtgggacttgaaacctggagccccgaaacccaaagccaaccagcaaaagcaggacgacggccggggtctggtgcttcctggctacaagtacctcggacccttcaacggactcgacaagggggagcccgtcaacgcggcggacgcagcggccctcgagcacgacaaggcctacgaccagcagctcaaagcgggtgacaatccgtacctgcggtataaccacgccgacgccgagtttcaggagcgtctgcaagaagatacgtcttttgggggcaacctcgggcgagcagtcttccaggccaagaagcgggttctcgaacctctcggtctggttgaggaaggcgctaagacggctcctggaaagaagagaccggtagagcaatcaccccaggaaccagactcctcttcgggcatcggcaagaaaggccagcagcccgcgaagaagagactcaactttgggcagacaggcgactcagagtcagtgcccgaccctcaaccactcggagaaccccccgcagccccctctggtgtgggatctaatacaatggcagcaggcggtggcgctccaatggcagacaataacgaaggcgccgacggagtgggtaacgcctcaggaaattggcattgcgattccacatggctgggcgacagagtcatcaccaccagcacccgaacctgggccctccccacctacaacaaccacctctacaagcaaatctccagccaatcgggagcaagcaccaacgacaacacctacttcggctacagcaccccctgggggtattttgactttaacagattccactgccacttctcaccacgtgactggcagcgactcatcaacaacaactggggattccggcccaagagactcaacttcaagctcttcaacatccaggtcaaggaggtcacgacgaatgatggcaccacgaccatcgccaataaccttaccagcacggttcaggtctttacggactcggaataccagctcccgtacgtcctcggctctgcgcaccagggctgcctgcctccgttcccggcggacgtcttcatgattcctcagtacgggtacctgactctgaacaatggcagtcaggccgtgggccgttcctccttctactgcctggagtactttccttctcaaatgctgagaacgggcaacaactttgagttcagctacacgtttgaggacgtgccttttcacagcagctacgcgcacagccaaagcctggaccggctgatgaaccccctcatcgaccagtacctgtactacctgtctcggactcagaccacgagtggtaccgcaggaaatcggacgttgcaattttctcaggccgggcctagtagcatggcgaatcaggccaaaaactggctacccgggccctgctaccggcagcaacgcgtctccaagacagcgaatcaaaataacaacagcaactttgcctggaccggtgccaccaagtatcatctgaatggcagagactctctggtaaatcccggtcccgctatggcaacccacaaggacgacgaagacaaattttttccgatgagcggagtcttaatatttgggaaacagggagctggaaatagcaacgtggaccttgacaacgttatgataaccagtgaggaagaaattaaaaccaccaacccagtggccacagaacagtacggcacggtggccactaacctgcaatcgtcaaacaccgctcctgctacagggaccgtcaacagtcaaggagccttacctggcatggtctggcagaaccgggacgtgtacctgcagggtcctatctgggccaagattcctcacacggacggacactttcatccctcgccgctgatgggaggctttggactgaaacacccgcctcctcagatcctgattaagaatacacctgttcccgcgaatcctccaactaccttcagtccagctaagtttgcgtcgttcatcacgcagtacagcaccggacaggtcagcgtggaaattgaatgggagctgcagaaagaaaacagcaaacgctggaacccagagattcaatacacttccaactacaacaaatctacaaatgtggactttgctgttgacacaaatggcgtttattctgagcctcgccccatcggcacccgttacctcacccgtaatctg

SEQ ID NO: 912 - protein, 737 aa, Artificial Sequence
  Description of Artificial Sequence: Synthetic polypeptide
MAADGYLPDWLEDNLSEGIREWWDLKPGAPKPKANQQKQDDGRGLVLPGYKYLGPFNGLDKGEPVNAADAAALEHDKAYDQQLKAGDNPYLRYNHADAEFQERLQEDTSFGGNLGRAVFQAKKRVLEPLGLVEEGAKTAPGKKRPVEQSPQEPDSSTGIGKKGQQPAKKRLNFGQTGDSESVPDPQPLGEPPAAPSGVGSNTMAAGGGAPMADNNEGADGVGNASGNWHCDSTWLGDRVITTSTRTWALPTYNNHLYKQISNSQSGGSTNDNTYFGYSTPWGYFDFNRFHCHFSPRDWQRLINNNWGFRPKRLNFKLFNIQVKEVTTNDGTTTIANNLTSTVQVFTDSEYQLPYVLGSAHQGCLPPFPADVFMIPQYGYLTLNNGSQAVGRSSFYCLEYFPSQMLRTGNNFEFSYTFEDVPFHSSYAHSQSLDRLMNPLIDQYLYYLSRTQTTGGTAGNRTLQFSQAGPSSMANQAKNWLPGPCYRQQRVSKTTNQNNNSNFAWTGATKYHLNGRDSLVNPGVAMATHKDDEDRFFPSSGVLIFGKQGAGNDNVDLDNVMITSEEEIKTTNPVATEEYGVVATNLQSANTAPQTGTVNSQGALPGMVWQNRDVYLQGPIWAKIPHTDGNFHPSPLMGGFGLKHPPPQILIKNTPVPANPPTTFSPAKFASFITQYSTGQVSVEIEWELQKENSKRWNPEIQYTSNYNKSTNVDFAVDTEGVYSEPRPIGTRYLTRNL

SEQ ID NO: 913 - DNA, 2211 bp, Artificial Sequence
  Description of Artificial Sequence: Synthetic polynucleotide
atggctgccgatggttatcttccagattggctcgaggacaacctctctgagggcattcgcgagtggtgggacttgaaacctggagccccgaaacccaaagccaaccagcaaaagcaggacgacggccggggtctggtgcttcctggctacaagtacctcggacccttcaacggactcgacaagggggagcccgtcaacgcggcggacgcagcggccctcgagcacgacaaggcctacgaccagcagctcaaagcgggtgacaatccgtacctgcggtataaccacgccgacgccgagtttcaggagcgtctgcaagaagatacgtcttttgggggcaacctcgggcgagcagtcttccaggccaagaagcgggttctcgaacctctcggtctggttgaggaaggcgctaagacggctcctggaaagaagagaccggtagagcaatcaccccaggaaccagactcctctacgggcatcggcaagaaaggccagcagcccgcgaaaaagagactcaactttgggcagactggcgactcagagtcagtgcccgaccctcaaccactcggagaaccccccgcagccccctctggtgtgggatctaatacaatggctgcaggcggtggcgctccaatggcagacaataacgaaggcgccgacggagtgggtaatgcctcaggaaattggcattgcgattccacatggctgggcgacagagtcatcaccaccagcacccgaacctgggccctccccacctacaacaaccacctctacaagcaaatctccaacagccaatcgggaggaagcaccaacgacaacacctacttcggctacagcaccccctgggggtattttgactttaacagattccactgccacttctcaccacgtgactggcagcgactcatcaacaacaactggggattccggcccaagagactcaacttcaagctcttcaacatccaggtcaaggaggtcacgacgaatgatggcaccacgaccatcgccaataaccttaccagcacggttcaggtctttacggactcggaataccagctcccgtacgtcctcggctctgcgcaccagggctgcctgcctccgttcccggcggacgtcttcatgattcctcagtacgggtacctgactctgaacaatggcagtcaggccgtgggccgttcctccttctactgcctggagtactttccttctcaaatgctgagaacgggcaacaactttgagttcagctacacgtttgaggacgtgccttttcacagcagctacgcgcacagccaaagcctggaccggctgatgaaccccctcatcgaccagtacctgtactacctgtctcggactcagaccacgggaggtaccgcaggaaatcggacgttgcaattttctcaggccgggcctagtagcatggcgaatcaggccaaaaactggctacccgggccctgctaccggcagcaacgcgtctccaagacaacgaatcaaaataacaacagcaactttgcctggaccggtgccaccaagtatcatctgaatggcagagactctctggtaaatcccggtgtcgctatggcaacccacaaggacgacgaagaccgattttttccgtccagcggagtcttaatatttgggaaacagggagctggaaatgacaacgtggaccttgacaacgttatgataaccagtgaggaagaaattaaaaccaccaacccagtggccacagaagagtacggcgtggtggccactaacctgcaatcggcaaacaccgctcctcaaacagggaccgtcaacagtcaaggagccttacctggcatggtctggcagaaccgggacgtgtacctgcagggtcctatctgggccaagattcctcacacggacggaaactttcatccctcgccgctgatgggaggctttggactgaaacacccgcctcctcagatcctgattaagaatacacctgttcccgcgaatcctccaactaccttcagtccagctaagtttgcgtcgttcatcacgcagtacagcaccggacaggtcagcgtggaaattgaatgggagctgcagaaagaaaacagcaaacgctggaacccagagattcaatacacttccaactacaacaaatctacaaatgtggactttgctgttgacacagaaggcgtttattctgagcctcgccccatcggcacccgttacctcacccgtaatctg

SEQ ID NO: 914 - protein, 738 aa, Artificial Sequence
  Description of Artificial Sequence: Synthetic polypeptide
MAADGYLPDWLEDNLSEGIREWWDLKPGAPKPKANQQKQDDGRGLVLPGYKYLGPFNGLDKGEPVNAADAAALEHDKAYDQQLKAGDNPYLRYNHADAEFQERLQEDTSFGGNLGRAVFQAKKRVLEPLGLVEEGAKTAPGKKRPVEQSPQREPDSSTGIGKKGQQPAKKRLNFGQTGDSESVPDPQPLGEPPAAPSGVGSNTMAAGGGAPMADNNEGADGVGNSSGNWHCDSTWLGDRVITTSTRTWALPTYNNHLYKQISNGTSGGSTNDNTYFGYSTPWGYFDFNRFHCHFSPRDWQRLINNNWGFRPKRLNFKLFNIQVKEVTTNEGTKTIANNLTSTVQVFTDSEYQLPYVLGSAHQGCLPPFPADVFMIPQYGYLTLNNGSQAVGRSSFYCLEYFPSQMLRTGNNFQFSYTFEDVPFHSSYAHSQSLDRLMNPLIDQYLYYLSRTQTTGGTAGTQTLQFSQAGPSSMANQAKNWLPGPCYRQQRVSTTTNQNNNSNFAWTGATKYHLNGRDSLVNPGVAMATHKDDEDRFFPSSGVLIFGKQGAGNDNVDYSNVMITSEEEIKTTNPVATEEYGVVATNLQSANTAPQTGTVNSQGALPGMVWQNRDVYLQGPIWAKIPHTDGNFHPSPLMGGFGLKHPPPQILIKNTPVPADPPTTFNQAKLNSFITQYSTGQVSVEIEWELQKENSKRWNPEIQYTSNYYKSTNVDFAVNTEGVYSEPRPIGTRYLTRNL

SEQ ID NO: 915 - DNA, 2214 bp, Artificial Sequence
  Description of Artificial Sequence: Synthetic polynucleotide
atggctgccgatggttatcttccagattggctcgaggacaacctctctgagggcattcgcgagtggtgggacctgaaacctggagccccgaaacccaaagccaaccagcaaaagcaggacgacggccggggtctggtgcttcctggctacaagtacctcggacccttcaacggactcgacaagggggagcccgtcaacgcggcggacgcagcggccctcgagcacgacaaggcctacgaccagcagctcaaagcgggtgacaatccgtacctgcggtataatcacgccgacgccgagtttcaggagcgtctgcaagaagatacgtcttttgggggcaacctcgggcgagcagtcttccaggccaagaagcgggttctcgaacctctcggtctggttgaggaaggcgctaagacggctcctggaaagaagagaccggtagagcagtcaccacagcgtgagcccgactcctccacgggcatcggcaagaaaggccagcagcccgccaaaaagagactcaatttcggtcagactggcgactcagagtcagtccccgaccctcaacctctcggagaacctccagcagcgccctctggtgtgggatctaatacaatggctgcaggcggtggcgcaccaatggcagacaataacgaaggtgccgacggagtgggtaattcctcgggaaattggcattgcgattccacatggctgggcgacagagtcatcaccaccagcacccgaacctgggccctgcccacctacaacaaccacctctacaagcaaatctccaacgggacctcgggaggcagcaccaacgacaacacctactttggctacagcaccccctgggggtattttgactttaacagattccactgccacttctcaccacgtgactggcagcgactcatcaacaacaactggggattccggcccaagagactcaacttcaagctcttcaacatccaggtcaaagaggtcacgacgaatgaaggcaccaagaccatcgccaataacctcaccagcaccgtccaggtgtttacggactcggaataccagctgccgtacgtcctcggctctgcccaccagggctgcctgcctccgttcccggcggacgtcttcatgattcctcagtacggctacctgactctcaacaacggtagtcaggccgtgggacgttcctccttctactgcctggagtacttcccctctcagatgctgagaacgggcaacaactttcaattcagctacactttcgaggacgtgcctttccacagcagctacgcgcacagccagagtttggacaggctgatgaatcctctcatcgaccagtacctgtactacctgtcaagaacccagactacgggaggcacagcgggaacccagacgttgcagttttctcaggccgggcctagcagcatggcgaatcaggccaaaaactggctgcctggaccctgctacagacagcagcgcgtctccacgacaacgaatcaaaacaacaacagcaactttgcctggactggtgccaccaagtatcatctgaacggcagagactctctggtgaatccgggcgtcgccatggcaacccacaaggacgacgaggaccgcttcttcccatccagcggcgtcctcatatttggcaagcagggagctggaaatgacaacgtggactatagcaacgtgatgataaccagcgaggaagaaatcaagaccaccaaccccgtggccacagaagagtatggcgtggtggctactaacctacagtcggcaaacaccgctcctcaaacggggaccgtcaacagccagggagccttacctggcatggtctggcagaaccgggacgtgtacctgcagggtcctatttgggccaagattcctcacacagatggcaactttcacccgtctcctttaatgggcggctttggacttaaacatccgcctcctcagatcctcatcaaaaacactcctgttcctgcggatcctccaacaacgttcaaccaggccaagctgaattctttcatcacgcagtacagcaccggacaagtcagcgtggagatcgagtgggagctgcagaaggagaacagcaagcgctggaacccagagattcagtatacttccaactactacaaatctacaaatgtggactttgctgttaatactgagggtgtttactctgagcctcgccccattggcactcgttacctcacccgtaatctg

SEQ ID NO: 916 - protein, 738 aa, Artificial Sequence
  Description of Artificial Sequence: Synthetic polypeptide
MAADGYLPDWLEDNLSEGIREWWDLKPGAPKPKANQQKQDDGRGLVLPGYKYLGPFNGLDKGEPVNAADAAALEHDKAYDQQLKAGDNPYLRYNHADAEFQERLQEDTSFGGNLGRAVFQAKKRVLEPLGLVEEGAKTAPGKKRPVEQSPQREPDSSTGIGKKGQQPARKRLNFGQTGDSESVPDPQPLGEPPAAPSGVGSNTMAAGGGAPMADNNEGADGVGSSSGNWHCDSTWLGDRVITTSTRTWALPTYNNHLYKQISNGTSGGSTNDNTYFGYSTPWGYFDFNRFHCHFSPRDWQRLINNNWGFRPKRLNFKLFNIQVKEVTQNEGTKTIANNLTSTIQVFTDSEYQLPYVLGSAHQGCLPPFPADVFMIPQYGYLTLNNGSQAVGRSSFYCLEYFPSQMLRTGNNFQFSYTFEDVPFHSSYAHSQSLDRLMNPLIDQYLYYLSRTQTTGGTAGTQTLQFSQAGPSNMANQAKNWLPGPCYRQQRVSTTTSQNNNSNFAWTGATKYHLNGRDSLVNPGVAMATHKDDEDRFFPSSGILIFGKQGAGKDNVDYSNVMLTSEEEIKTTNPVATEEYGVVADNLQQQNTAPQIGTVNSQGALPGMVWQNRDVYLQGPIWAKIPHTDGNFHPSPLMGGFGLKHPPPQILIKNTPVPADPPTTFNQAKLNSFITQYSTGQVSVEIEWELQKENSKRWNPEIQYTSNYYKSTNVDFAVNTEGVYSEPRPIGTRYLTRNL

SEQ ID NO: 917 - DNA, 2214 bp, Artificial Sequence
  Description of Artificial Sequence: Synthetic polynucleotide
atggctgccgatggttatcttccagattggctcgaggacaacctctctgagggcattcgcgagtggtgggacctgaaacctggagccccgaaacccaaagccaaccagcaaaagcaggacgacggccggggtctggtgcttcctggctacaagtacctcggacccttcaacggactcgacaagggggagcccgtcaacgcggcggacgcagcggccctcgagcacgacaaggcctacgaccagcagctcaaagcgggtgacaatccgtacctgcggtataatcacgccgacgccgagtttcaggagcgtctgcaagaagatacgtcttttgggggcaacctcgggcgagcagtcttccaggccaagaagcgggttctcgaacctctcggtctggttgaggaaggcgctaagacggctcctggaaagaagagaccggtagagcagtcaccacagcgtgagcccgactcctccacgggcatcggcaagaaaggccagcagcccgccagaaagagactcaatttcggtcagactggcgactcagagtcagtccccgaccctcaacctctcggagaacctccagcagcgccctctggtgtgggatctaatacaatggctgcaggcggtggcgcaccaatggcagacaataacgaaggtgccgacggagtgggtagttcctcgggaaattggcattgcgattccacatggctgggcgacagagtcatcaccaccagcacccgaacctgggccctgcccacctacaacaaccacctctacaagcaaatctccaacgggacctcgggaggcagcaccaacgacaacacctactttggctacagcaccccctgggggtattttgactttaacagattccactgccacttctcaccacgtgactggcagcgactcatcaacaacaactggggattccggcccaagagactcaacttcaagctcttcaacatccaggtcaaagaggtcacgcagaatgaaggcaccaagaccatcgccaataacctcaccagcaccatccaggtgtttacggactcggaataccagctgccgtacgtcctcggctctgcccaccagggctgcctgcctccgttcccggcggacgtcttcatgattcctcagtacggctacctgactctcaacaacggtagtcaggccgtgggacgttcctccttctactgcctggagtacttcccctctcagatgctgagaacgggcaacaactttcaattcagctacactttcgaggacgtgcctttccacagcagctacgcgcacagccagagtttggacaggctgatgaatcctctcatcgaccagtacctgtactacctgtcaagaacccagactacgggaggcacagcgggaacccagacgttgcagttttctcaggccgggcctagcaacatggcgaatcaggccaaaaactggctgcctggaccctgctacagacagcagcgcgtctccacgacaacgtcgcaaaacaacaacagcaactttgcctggactggtgccaccaagtatcatctgaacggcagagactctctggtgaatccgggcgtcgccatggcaacccacaaggacgacgaggaccgcttcttcccatccagcggcatcctcatatttggcaagcagggagctggaaaagacaacgtggactatagcaacgtgatgctaaccagcgaggaagaaatcaagaccaccaaccccgtggccacagaagagtatggcgtggtggctgataacctacagcagcaaaacaccgctcctcaaatagggaccgtcaacagccagggagccttacctggcatggtctggcagaaccgggacgtgtacctgcagggtcctatttgggccaagattcctcacacagatggcaactttcacccgtctcctttaatgggcggctttggacttaaacatccgcctcctcagatcctcatcaaaaacactcctgttcctgcggatcctccaacaacgttcaaccaggccaagctgaattctttcatcacgcagtacagcaccggacaagtcagcgtggagatcgagtgggagctgcagaaggagaacagcaagcgctggaacccagagattcagtatacttccaactactacaaatctacaaatgtggactttgctgttaatactgagggtgtttactctgagcctcgccccattggcactcgttacctcacccgtaatctg

SEQ ID NO: 918 - protein, 738 aa, Artificial Sequence
  Description of Artificial Sequence: Synthetic polypeptide
MAADGYLPDWLEDNLSEGIREWWDLKPGAPKPKANQQKQDDGRGLVLPGYKYLGPFNGLDKGEPVNAADAAALEHDKAYDQQLKAGDNPYLRYNHADAEFQERLQEDTSFGGNLGRAVFQAKKRVLEPLGLVEEGAKTAPGKKRPVEPSPQRSPDSSTGIGKKGQQPARKRLNFGQTGDSESVPDPQPIGEPPAAPSGVGSGTMAAGGGAPMADNNEGADGVGSSSGNWHCDSTWLGDRVITTSTRTWALPTYNNHLYKQISNGTSGGSTNDNTYFGYSTPWGYFDFNRFHCHFSPRDWQRLINNNWGFRPKRLNFKLFNIQVKEVTQNEGTKTIANNLTSTIQVFTDSEYQLPYVLGSAHQGCLPPFPADVFMIPQYGYLTLNNGSQAVGRSSFYCLEYFPSQMLRTGNNFEFSYTFEDVPFHSSYAHSQSLDRLMNPLIDQYLYYLSRTQSTGGTAGTQQLLFSQAGPSNMSAQAKNWLPGPCYRQQRVSTTLSQNNNSNFAWTGATKYHLNGRDSLVNPGVAMATHKDDEDRFFPSSGILMFGKQGAGKDNVDYSNVMLTSEEEIKTTNPVATEQYGVVADNLQQQNTAPIVGAVNSQGALPGMVWQNRDVYLQGPIWAKIPHTDGNFHPSPLMGGFGLKHPPPQILIKNTPVPADPPTTFNQAKLNSFITQYSTGQVSVEIEWELQKENSKRWNPEIQYTSNYYKSTNVDFAVNTEGVYSEPRPIGTRYLTRNL

SEQ ID NO: 919 - DNA, 2214 bp, Artificial Sequence
  Description of Artificial Sequence: Synthetic polynucleotide
atggctgccgatggttatcttccagattggctcgaggacaacctctctgagggcattcgcgagtggtgggacctgaaacctggagccccgaaacccaaagccaaccagcaaaagcaggacgacggccggggtctggtgcttcctggctacaagtacctcggacccttcaacggactcgacaagggggagcccgtcaacgcggcggacgcagcggccctcgagcacgacaaggcctacgaccagcagctcaaagcgggtgacaatccgtacctgcggtataatcacgccgacgccgagtttcaggagcgtctgcaagaagatacgtcttttgggggcaacctcgggcgagcagtcttccaggccaagaagcgggttctcgaacctctcggtctggttgaggaaggcgctaagacggctcctggaaagaagagaccggtagagccgtcaccacagcgttcccccgactcctccacgggcatcggcaagaaaggccagcagcccgccagaaagagactcaatttcggtcagactggcgactcagagtcagtccccgaccctcaacctatcggagaacctccagcagcgccctctggtgtgggatctggtacaatggctgcaggcggtggcgcaccaatggcagacaataacgaaggtgccgacggagtgggtagttcctcgggaaattggcattgcgattccacatggctgggcgacagagtcatcaccaccagcacccgaacctgggccctgcccacctacaacaaccacctctacaagcaaatctccaacgggacctcgggaggcagcaccaacgacaacacctactttggctacagcaccccctgggggtattttgactttaacagattccactgccacttctcaccacgtgactggcagcgactcatcaacaacaactggggattccggcccaagagactcaacttcaagctcttcaacatccaggtcaaagaggtcacgcagaatgaaggcaccaagaccatcgccaataacctcaccagcaccatccaggtgtttacggactcggaataccagctgccgtacgtcctcggctctgcccaccagggctgcctgcctccgttcccggcggacgtcttcatgattcctcagtacggctacctgactctcaacaacggtagtcaggccgtgggacgttcctccttctactgcctggagtacttcccctctcagatgctgagaacgggcaacaactttgagttcagctacactttcgaggacgtgcctttccacagcagctacgcgcacagccagagtttggacaggctgatgaatcctctcatcgaccagtacctgtactacctgtcaagaacccagtctacgggaggcacagcgggaacccagcagttgctgttttctcaggccgggcctagcaacatgtcggctcaggccaaaaactggctgcctggaccctgctacagacagcagcgcgtctccacgacactgtcgcaaaacaacaacagcaactttgcctggactggtgccaccaagtatcatctgaacggcagagactctctggtgaatccgggcgtcgccatggcaacccacaaggacgacgaggaccgcttcttcccatccagcggcatcctcatgtttggcaagcagggagctggaaaagacaacgtggactatagcaacgtgatgctaaccagcgaggaagaaatcaagaccaccaaccccgtggccacagaacagtatggcgtggtggctgataacctacagcagcaaaacaccgctcctattgtgggggccgtcaacagccagggagccttacctggcatggtctggcagaaccgggacgtgtacctgcagggtcctatttgggccaagattcctcacacagatggcaactttcacccgtctcctttaatgggcggctttggacttaaacatccgcctcctcagatcctcatcaaaaacactcctgttcctgcggatcctccaacaacgttcaaccaggccaagctgaattctttcatcacgcagtacagcaccggacaagtcagcgtggagatcgagtgggagctgcagaaggagaacagcaagcgctggaacccagagattcagtatacttccaactactacaaatctacaaatgtggactttgctgttaatactgagggtgtttactctgagcctcgccccattggcactcgttacctcacccgtaatctg

SEQ ID NO: 920 - protein, 738 aa, Artificial Sequence
  Description of Artificial Sequence: Synthetic polypeptide
MAADGYLPDWLEDNLSEGIREWWDLKPGAPKPKANQQKQDDGRGLVLPGYKYLGPFNGLDKGEPVNAADAAALEHDKAYDQQLKAGDNPYLRYNHADAEFQERLQEDTSFGGNLGRAVFQAKKRVLEPLGLVEEGAKTAPGKKRPVEPSPQRSPDSSTGIGKKGQQPAKKRLNFGQTGDSESVPDPQPIGEPPAGPSGLGSGTMAAGGGAPMADNNEGADGVGSSSGNWHCDSTWLGDRVITTSTRTWALPTYNNHLYKQISNGTSGGSTNDNTYFGYSTPWGYFDFNRFHCHFSPRDWQRLINNNWGFRPKRLNFKLFNIQVKEVTQNEGTKTIANNLTSTIQVFTDSEYQLPYVLGSAHQGCLPPFPADVFMIPQYGYLTLNNGSQAVGRSSFYCLEYFPSQMLRTGNNFEFSYTFEDVPFHSSYAHSQSLDRLMNPLIDQYLYYLSRTQSTGGTAGTQQLLFSQAGPSNMSAQAKNWLPGPCYRQQRVSTTLSQNNNSNFAWTGATKYHLNGRDSLVNPGVAMATHKDDEERFFPSSGVLMFGKQGAGKDNVDYSSVMLTSEEEIKTTNPVATEQYGVVADNLQQQNTAPIVGAVNSQGALPGMVWQNRDVYLQGPIWAKIPHTDGNFHPSPLMGGFGLKHPPPQILIKNTPVPADPPTTFSQAKLASFITQYSTGQVSVEIEWELQKENSKRWNPEIQYTSNYYKSTNVDFAVNTEGTYSEPRPIGTRYLTRNL

SEQ ID NO: 921 - DNA, 2214 bp, Artificial Sequence
  Description of Artificial Sequence: Synthetic polynucleotide
atggctgccgatggttatcttccagattggctcgaggacaacctctctgagggcattcgcgagtggtgggacttgaaacctggagccccgaaacccaaagccaaccagcaaaagcaggacgacggccggggtctggtgcttcctggctacaagtacctcggacccttcaacggactcgacaagggggagcccgtcaacgcggcggacgcagcggccctcgagcacgacaaggcctacgaccagcagctcaaagcgggtgacaatccgtacctgcggtataaccacgccgacgccgagtttcaggagcgtctgcaagaagatacgtcttttgggggcaacctcgggcgagcagtcttccaggccaagaagcgggttctcgaacctctcggtctggttgaggaaggcgctaagacggctcctggaaagaagagaccggtagagccatcaccccagcgttctccagactcctctacgggcatcggcaagaaaggccagcagcccgcgaaaaagagactcaactttgggcagactggcgactcagagtcagtgcccgaccctcaaccaatcggagaaccccccgcaggcccctctggtctgggatctggtacaatggctgcaggcggtggcgctccaatggcagacaataacgaaggcgccgacggagtgggtagttcctcaggaaattggcattgcgattccacatggctgggcgacagagtcatcaccaccagcacccgaacctgggccctccccacctacaacaaccacctctacaagcaaatctccaacgggacttcgggaggaagcaccaacgacaacacctacttcggctacagcaccccctgggggtattttgactttaacagattccactgccacttctcaccacgtgactggcagcgactcatcaacaacaactggggattccggcccaagagactcaacttcaagctcttcaacatccaggtcaaggaggtcacgcagaatgaaggcaccaagaccatcgccaataaccttaccagcacgattcaggtctttacggactcggaataccagctcccgtacgtcctcggctctgcgcaccagggctgcctgcctccgttcccggcggacgtcttcatgattcctcagtacgggtacctgactctgaacaatggcagtcaggccgtgggccgttcctccttctactgcctggagtactttccttctcaaatgctgagaacgggcaacaactttgagttcagctacacgtttgaggacgtgccttttcacagcagctacgcgcacagccaaagcctggaccggctgatgaaccccctcatcgaccagtacctgtactacctgtctcggactcagtccacgggaggtaccgcaggaactcagcagttgctattttctcaggccgggcctagtaacatgtcggctcaggccaaaaactggctacccgggccctgctaccggcagcaacgcgtctccacgacactgtcgcaaaataacaacagcaactttgcctggaccggtgccaccaagtatcatctgaatggcagagactctctggtaaatcccggtgtcgctatggcaacccacaaggacgacgaagagcgattttttccgtccagcggagtcttaatgtttgggaaacagggagctggaaaagacaacgtggactatagcagcgttatgctaaccagtgaggaagaaattaaaaccaccaacccagtggccacagaacagtacggcgtggtggccgataacctgcaacagcaaaacaccgctcctattgtaggggccgtcaacagtcaaggagccttacctggcatggtctggcagaaccgggacgtgtacctgcagggtcctatctgggccaagattcctcacacggacggaaactttcatccctcgccgctgatgggaggctttggactgaaacacccgcctcctcagatcctgattaagaatacacctgttcccgcggatcctccaactaccttcagtcaagctaagctggcgtcgttcatcacgcagtacagcaccggacaggtcagcgtggaaattgaatgggagctgcagaaagaaaacagcaaacgctggaacccagagattcaatacacttccaactactacaaatctacaaatgtggactttgctgttaacacagaaggcacttattctgagcctcgccccatcggcacccgttacctcacccgtaatctg

SEQ ID NO: 922 - protein, 737 aa, Artificial Sequence
  Description of Artificial Sequence: Synthetic polypeptide
MAADGYLPDWLEDNLSEGIREWWDLKPGAPKPKANQQKQDDGRGLVLPGYKYLGPFNGLDKGEPVNAADAAALEHDKAYDQQLKAGDNPYLRYNHADAEFQERLQEDTSFGGNLGRAVFQAKKRVLEPLGLVEEGAKTAPGKKRPVEPSPQRSPDSSTGIGKKGQQPAKKRLNFGQTGDSESVPDPQPLGEPPAAPSGVGSGTMAAGGGAPMADNNEGADGVGNASGNWHCDSTWLGDRVITTSTRTWALPTYNNHLYKQISSQSAGSTNDNTYFGYSTPWGYFDFNRFHCHFSPRDWQRLINNNWGFRPKKLRFKLFNIQVKEVTTNDGVTTIANNLTSTVQVFSDSEYQLPYVLGSAHQGCLPPFPADVFMIPQYGYLTLNNGSQSVGRSSFYCLEYFPSQMLRTGNNFEFSYTFEDVPFHSSYAHSQSLDRLMNPLIDQYLYYLARTQSTTGGTAGNRELQFYQAGPSTMAEQAKNWLPGPCYRQQRVSKTLDQNNNSNFAWTGATKYHLNGRNSLVNPGVAMATHKDDEDRFFPSSGVLIFGKTGAANKTTLENVLMTNEEEIKTTNPVATEEYGVVSSNLQSANTAPQTQTVNSQGALPGMVWQNRDVYLQGPIWAKIPHTDGNFHPSPLMGGFGLKHPPPQILIKNTPVPANPPEVFTPAKFASFITQYSTGQVSVEIEWELQKENSKRWNPEIQYTSNYDKSTNVDFAVDSEGVYSEPRPIGTRYLTRNL

SEQ ID NO: 923 - DNA, 2211 bp, Artificial Sequence
  Description of Artificial Sequence: Synthetic polynucleotide
atggctgccgatggttatcttccagattggctcgaggacaacctctctgagggcattcgcgagtggtgggacctgaaacctggagccccgaaacccaaagccaaccagcaaaagcaggacgacggccggggtctggtgcttcctggctacaagtacctcggacccttcaacggactcgacaagggggagcccgtcaacgcggcggacgcagcggccctcgagcacgacaaggcctacgaccagcagctcaaagcgggtgacaatccgtacctgcggtataaccacgccgacgccgagtttcaggagcgtctgcaagaagatacgtcatttgggggcaacctcgggcgagcagtcttccaggccaagaagcgggttctcgaacctctcggtctggttgaggaaggcgctaagacggctcctggaaagaagagaccggtagagccgtcacctcagcgttcccccgactcctccacgggcatcggcaagaaaggccagcagcccgccaaaaagagactcaatttcggtcagactggcgactcagagtcagtccccgaccctcaacctctcggagaacctccagcagcgccctctggtgtgggatctggtacaatggctgcaggcggtggcgcaccaatggcagacaataacgaaggtgccgacggagtgggtaatgcctcaggaaattggcattgcgattccacatggctgggcgacagagtcattaccaccagcacccgaacctgggccctgcccacctacaacaaccacctctacaagcaaatctccagtcaaagtgcaggtagtaccaacgacaacacctacttcggctacagcaccccctgggggtattttgactttaacagattccactgccacttctcaccacgtgactggcagcgactcatcaacaacaactggggattccggcccaagaagctgcggttcaagctcttcaacatccaggtcaaggaggtcacgacgaatgacggcgttacgaccatcgctaataaccttaccagcacggttcaggtattctcggactcggaataccagctgccgtacgtcctcggctctgcgcaccagggctgcctgcctccgttcccggcggacgtcttcatgattcctcagtacggctacctgactctcaacaatggcagtcagtctgtgggacgttcctccttctactgcctggagtacttcccctctcagatgctgagaacgggcaacaactttgagttcagctacaccttcgaggacgtgcctttccacagcagctacgcacacagccagagcctggaccggctgatgaatcccctcatcgaccagtacttgtactacctggccagaacacagagtaccacaggaggcacagctggcaatcgggaactgcagttttaccaggccgggccttcaactatggccgaacaagccaagaattggttacctggaccttgctaccggcaacaaagagtctccaaaacgctggatcaaaacaacaacagcaactttgcttggactggtgccaccaaatatcacctgaacggcagaaactcgttggttaatcccggcgtcgccatggcaactcacaaggacgacgaggaccgctttttcccatccagcggagtcctgatttttggaaaaactggagcagctaacaaaactacattggaaaatgtgttaatgacaaatgaagaagaaattaaaactactaatcctgtagccacggaagaatacggggtagtcagcagcaacttacaatcggctaatactgcaccccagacacaaactgtcaacagccagggagccttacctggcatggtctggcagaaccgggacgtgtacctgcagggtcccatctgggccaagattcctcacacggatggcaactttcacccgtctcctttgatgggcggctttggacttaaacatccgcctcctcagatcctgatcaagaacactcccgttcccgctaatcctccggaggtgtttactcctgccaagtttgcttcgttcatcacacagtacagcaccggacaagtcagcgtggaaatcgagtgggagctgcagaaggaaaacagcaagcgctggaacccggagattcagtacacctccaactatgataagtcgactaatgtggactttgccgttgacagcgagggtgtttactctgagcctcgccctattggcactcgttacctcacccgtaatctg

SEQ ID NO: 924 - protein, 735 aa, Artificial Sequence
  Description of Artificial Sequence: Synthetic polypeptide
MAADGYLPDWLEDNLSEGIREWWDLKPGAPKPKANQQKQDDGRGLVLPGYKYLGPFNGLDKGEPVNAADAAALEHDKAYDQQLKAGDNPYLRYNHADAEFQERLQEDTSFGGNLGRAVFQAKKRVLEPLGLVEEGAKTAPGKKRPVEQSPQEPDSSSGIGKSGQQPAKKRLNFGQTGDSESVPDPQPLGEPPAAPSGVGSNTMASGGGAPMADNNEGADGVGNASGNWHCDSTWLGDRVITTSTRTWALPTYNNHLYKQISSQSGASNDNHYFGYSTPWGYFDFNRFHCHFSPRDWQRLINNNWGFRPKRLNFKLFNIQVKEVTTNDGTTTIANNLTSTVQVFTDSEYQLPYVLGSAHQGCLPPFPADVFMIPQYGYLTLNNGSQAVGRSSFYCLEYFPSQMLRTGNNFTFSYTFEDVPFHSSYAHSQSLDRLMNPLIDQYLYYLSRTQTTSGTAQNRELQFSQAGPSSMANQAKNWLPGPCYRQQRVSKTANDNNNSNFAWTGATKYHLNGRDSLVNPGPAMASHKDDEDKFFPMSGVLIFGKQGAGASNVDLDNVMITDEEEIKTTNPVATEQYGTVATNLQSSNTAPATGTVNSQGALPGMVWQDRDVYLQGPIWAKIPHTDGHFHPSPLMGGFGLKHPPPQILIKNTPVPANPPTTFSPAKFASFITQYSTGQVSVEIEWELQKENSKRWNPEIQYTSNYNKSANVDFTVDTNGVYSEPRPIGTRYLTRNL

SEQ ID NO: 925 - DNA, 2205 bp, Artificial Sequence
  Description of Artificial Sequence: Synthetic polynucleotide
atggctgccgatggttatcttccagattggctcgaggacaacctctctgagggcattcgcgagtggtgggacttgaaacctggagccccgaaacccaaagccaaccagcaaaagcaggacgacggccggggtctggtgcttcctggctacaagtacctcggacccttcaacggactcgacaagggggagcccgtcaacgcggcggatgcagcggccctcgagcacgacaaggcctacgaccagcagctcaaagcgggtgacaatccgtacctgcggtataaccacgccgacgccgagtttcaggagcgtctgcaagaagatacgtcttttgggggcaacctcgggcgagcagtcttccaggccaagaagagggttctcgaacctcttggtctggttgaggaaggtgctaagacggctcctggaaagaaacgtccggtagagcagtcgccacaagagccagactcctcctcgggcattggcaagtcaggccagcagcccgctaaaaagagactcaattttggtcagactggcgactcagagtcagtccccgacccacaacctctcggagaacctccagcagccccctctggtgtgggatctaatacaatggcttcaggcggtggcgcaccaatggcagacaataacgaaggcgccgacggagtgggtaatgcctcaggaaattggcattgcgattccacatggctgggcgacagagtcatcaccaccagcacccgaacatgggccttgcccacctataacaaccacctctacaagcaaatctccagtcaatcaggggccagcaacgacaaccactacttcggctacagcaccccctgggggtattttgatttcaacagattccactgccatttctcaccacgtgactggcagcgactcatcaacaacaattggggattccggcccaagagactcaacttcaagctcttcaacatccaagtcaaggaggtcacgacgaatgatggcaccacgaccatcgctaataaccttaccagcacggttcaagtcttcacggactcggagtaccagttgccgtacgtcctcggctctgcgcaccagggctgcctccctccgttcccggcggacgtgttcatgattccgcagtacggctacctaacgctcaacaatggcagccaggcagtgggacggtcatccttttactgcctggaatatttcccatcgcagatgctgagaacgggcaataactttaccttcagctacaccttcgaggacgtgcctttccacagcagctacgcgcacagccagagcctggaccggctgatgaatcctctcatcgaccagtacctgtattacctgagcagaactcagactacgtccggaactgcccaaaacagggagttgcagtttagccaggcgggtccatctagcatggctaatcaggccaaaaactggctacctggaccctgttaccggcagcagcgcgtttctaaaacagcaaatgacaacaacaacagcaactttgcctggactggtgctacaaaatatcaccttaatgggcgtgattctttagtcaaccctggccctgctatggcctcacacaaagacgacgaagacaagttctttcccatgagcggtgtcttgatttttggaaagcagggcgccggagcttcaaacgttgatttggacaatgtcatgatcacagacgaagaggaaatcaaaaccactaaccccgtggccaccgaacaatatgggactgtggcaaccaatctccagagcagcaacacagcccctgcgaccggaactgtgaattctcagggagccttacctggaatggtgtggcaagacagagacgtatacctgcagggtcctatttgggccaaaattcctcacacggatggacactttcacccgtctcctctcatgggcggctttggacttaagcacccgcctcctcagatcctcatcaaaaacacgcctgttcctgcgaatcctccgacaacgttttcgcctgcaaagtttgcttcattcatcacccagtattccacaggacaagtgagcgtggagattgaatgggagctgcagaaagaaaacagcaaacgctggaatcccgaaatacagtatacatctaactataataaatctgccaacgttgatttcactgtggacaccaatggagtttatagtgagcctcgccccattggcacccgttacctcacccgtaacctg

SEQ ID NO: 926 - protein, 735 aa, Artificial Sequence
  Description of Artificial Sequence: Synthetic polypeptide
MAADGYLPDWLEDNLSEGIREWWDLKPGAPQPKANQQHQDDGRGLVLPGYKYLGPFNGLDKGEPVNEADAAALEHDKAYDQQLKAGDNPYLKYNHADAEFQERLQEDTSFGGNLGRAVFQAKKRVLEPLGLVEEAAKTAPGKKRPVEQSPQEPDSSSGIGKSGQQPARKRLNFGQTGDSESVPDPQPLGEPPAAPSGVGSNTMASGGGAPMADNNEGADGVGNSSGNWHCDSTWLGDRVITTSTRTWALPTYNNHLYKQISSQSGASNDNHYFGYSTPWGYFDFNRFHCHFSPRDWQRLINNNWGFRPKKLNFKLFNIQVKEVTQNDGTTTIANNLTSTVQVFTDSEYQLPYVLGSAHQGCLPPFPADVFMIPQYGYLTLNNGSQAVGRSSFYCLEYFPSQMLRTGNNFTFSYTFEDVPFHSSYAHSQSLDRLMNPLIDQYLYYLSRTQTTSGTTQQSRLQFSQAGPSSMAQQAKNWLPGPCYRQQRVSKTANDNNNSNFAWTGATKYHLNGRDSLVNPGPAMASHKDDEEKFFPMHGVLIFGKQGTGASNVDLDNVMITDEEEIRTTNPVATEQYGTVATNLQSSNTAPATGTVNSQGALPGMVWQDRDVYLQGPIWAKIPHTDGHFHPSPLMGGFGLKHPPPQILIKNTPVPANPPTTFSPAKFASFITQYSTGQVSVEIEWELQKENSKRWNPEIQYTSNYNKSVNVDFTVDTNGVYSEPRPIGTRYLTRNL

SEQ ID NO: 927 - DNA, 2205 bp, Artificial Sequence
  Description of Artificial Sequence: Synthetic polynucleotide
atggctgctgacggttatcttccagattggctcgaggacaacctttctgaaggcattcgtgagtggtgggatctgaaacctggagcccctcaacccaaagcgaaccaacaacaccaggacgacggtcggggtcttgtgcttccgggttacaaatacctcggaccctttaacggactcgacaaaggagagccggtcaacgaggcggacgcggcagccctcgaacacgacaaagcttacgaccagcagctcaaggccggtgacaacccgtacctcaagtacaaccacgccgacgccgagtttcaggagcgtcttcaagaagatacgtcttttgggggcaaccttggcagagcagtcttccaggccaaaaagagggtccttgagcctcttggtctggttgaggaagcagctaaaacggctcctggaaagaagaggcctgtagaacagtctcctcaggaaccggactcatcatctggtattggcaaatcgggccaacagcctgccagaaaaagactaaatttcggtcagactggagactcagagtcagtcccagaccctcaacctctcggagaaccaccagcagccccctcaggtgtgggatctaatacaatggcttcaggcggtggcgcaccaatggcagacaataacgagggtgccgatggagtgggtaattcctcaggaaattggcattgcgattccacatggctgggcgacagagtcatcaccaccagcaccagaacctgggccctgcccacttacaacaaccatctctacaagcaaatctccagccaatcaggagcttcaaacgacaaccactactttggctacagcaccccttgggggtattttgactttaacagattccactgccacttctcaccacgtgactggcagcgactcattaacaacaactggggattccggcccaagaaactcaacttcaagctcttcaacatccaagttaaagaggtcacgcagaacgatggcacgacgactattgccaataaccttaccagcacggttcaagtgtttacggactcggagtatcagctcccgtacgtgctcgggtcggcgcaccaaggctgtctcccgccgtttccagcggacgtcttcatgatccctcagtatggatacctcaccctgaacaacggaagtcaagcggtgggacgctcatccttttactgcctggagtacttcccttcgcagatgctaaggactggaaataacttcacattcagctataccttcgaggatgtaccttttcacagcagctacgctcacagccagagtttggatcgcttgatgaatcctcttattgatcagtatctgtactacctgagcagaacgcaaacaacctctggaacaacccaacaatcacggctgcaatttagccaggctgggccttcgtctatggctcagcaggccaaaaattggctacctgggccctgctaccggcaacagagagtttcaaagactgctaacgacaacaacaacagtaactttgcttggacaggggccaccaaatatcatctcaatggccgcgactcgctggtgaatccaggaccagctatggccagtcacaaggacgatgaagaaaaatttttccctatgcacggcgttctaatatttggcaaacaagggacaggggcaagtaacgtagatttagataatgtaatgattacggatgaagaagagattcgtaccaccaatcctgtggcaacagagcagtatggaactgtggcaactaacttgcagagctcaaatacagctcccgcgactggaactgtcaatagtcagggggccttacctggcatggtgtggcaagatcgtgacgtgtaccttcaaggacctatctgggcaaagattcctcacacggatggacactttcatccttctcctctgatgggaggctttggactgaaacatccgcctcctcaaatcttgatcaaaaatactccggtaccggcaaatcctccgacgactttcagcccggccaagtttgcttcatttatcactcagtactccactggacaggtcagcgtggaaattgagtgggagctacagaaagaaaacagcaaacgttggaatccagagattcagtacacttccaactacaacaagtctgttaatgtggactttactgtagacactaatggtgtttatagtgaacctcgccctattggaacccggtatctcacacgaaacttg

SEQ ID NO: 928 - protein, 736 aa, Artificial Sequence
  Description of Artificial Sequence: Synthetic polypeptide
MAADGYLPDWLEDNLSEGIREWWDLKPGAPKPKANQQKQDDGRGLVLPGYKYLGPFNGLDKGEPVNAADAAALEHDKAYDQQLKAGDNPYLRYNHADAEFQERLQEDTSFGGNLGRAVFQAKKRVLEPLGLVEEGAKTAPGKKRPVEQSPQEPDSSSGIGKKGQQPARKRLNFGQTGDSESVPDPQPLGEPPAAPSGVGSNTMAAGGGAPMADNNEGADGVGNASGNWHCDSTWLGDRVITTSTRTWALPTYNNHLYKQISSQSGGSTNDNTYFGYSTPWGYFDFNRFHCHFSPRDWQRLINNNWGFRPKRLNFKLFNIQVKEVTTNDGTTTIANNLTSTVQVFTDSEYQLPYVLGSAHQGCLPPFPADVFMIPQYGYLTLNNGSQAVGRSSFYCLEYFPSQMLRTGNNFEFSYTFEDVPFHSSYAHSQSLDRLMNPLIDQYLYYLSRTQTTSGTAGNRTLQFSQAGPSSMANQAKNWLPGPCYRQQRVSKTANQNNNSNFAWTGATKYHLNGRDSLVNPGPAMATHKDDEDKFFPMSGVLIFGKQGAGNSNVDLDNVMITNEEEIKTTNPVATEQYGTVATNLQSANTAPATGTVNSQGALPGMVWQDRDVYLQGPIWAKIPHTDGHFHPSPLMGGFGLKHPPPQILIKNTPVPANPPTTFSPAKFASFITQYSTGQVSVEIEWELQKENSKRWNPEIQYTSNYNKSTNVDFAVDTNGVYSEPRPIGTRYLTRNL

SEQ ID NO: 929 - protein, 736 aa, Artificial Sequence
  Description of Artificial Sequence: Synthetic polypeptide
MAADGYLPDWLEDNLSEGIREWWDLKPGAPKPKANQQKQDDGRGLVLPGYKYLGPFNGLDKGEPVNAADAAALEHDKAYDQQLKAGDNPYLRYNHADAEFQERLQEDTSFGGNLGRAVFQAKKRVLEPLGLVEEGAKTAPGKKRPVEQSPQEPDSSSGIGKKGQQPAKKRLNFGQTGDSESVPDPQPLGEPPAAPSGVGSNTMASGGGAPMADNNEGADGVGNASGNWHCDSTWLGDRVITTSTRTWALPTYNNHLYKQISSQSGASTNDNTYFGYSTPWGYFDFNRFHCHFSPRDWQRLINNNWGFRPKRLNFKLFNIQVKEVTTNDGTTTIANNLTSTVQVFTDSEYQLPYVLGSAHQGCLPPFPADVFMIPQYGYLTLNNGSQAVGRSSFYCLEYFPSQMLRTGNNFQFSYTFEDVPFHSSYAHSQSLDRLMNPLIDQYLYYLSRTQTTSGTAGNRELQFSQAGPSSMANQAKNWLPGPCYRQQRVSKTTNQNNNSNFAWTGATKYHLNGRDSLVNPGPAMATHKDDEDKFFPMSGVLIFGKQGAGNSNVDLDNVMITNEEEIKTTNPVATEEYGTVATNLQSANTAPATGTVNSQGALPGMVWQNRDVYLQGPIWAKIPHTDGHFHPSPLMGGFGLKHPPPQILIKNTPVPANPPTTFSPAKFASFITQYSTGQVSVEIEWELQKENSKRWNPEIQYTSNYNKSTNVDFAVDTNGVYSEPRPIGTRYLTRNL

SEQ ID NO: 930 - protein, 736 aa, Artificial Sequence
  Description of Artificial Sequence: Synthetic polypeptide
MAADGYLPDWLEDNLSEGIREWWDLKPGAPKPKANQQKQDDGRGLVLPGYKYLGPFNGLDKGEPVNAADAAALEHDKAYDQQLKAGDNPYLRYNHADAEFQERLQEDTSFGGNLGRAVFQAKKRVLEPLGLVEEGAKTAPGKKRPVEQSPQEPDSSSGIGKKGQQPARKRLNFGQTGDSESVPDPQPLGEPPAAPSGVGSNTMAAGGGAPMADNNEGADGVGNASGNWHCDSTWLGDRVITTSTRTWALPTYNNHLYKQISSQSGGSTNDNTYFGYSTPWGYFDFNRFHCHFSPRDWQRLINNNWGFRPKRLNFKLFNIQVKEVTTNDGTTTIANNLTSTVQVFTDSEYQLPYVLGSAHQGCLPPFPADVFMIPQYGYLTLNNGSQAVGRSSFYCLEYFPSQMLRTGNNFEFSYTFEDVPFHSSYAHSQSLDRLMNPLIDQYLYYLSRTQTTSGTAGNRELQFSQAGPSSMANQAKNWLPGPCYRQQRVSKTTNQNNNSNFAWTGATKYHLNGRDSLVNPGPAMATHKDDEDKFFPMSGVLIFGKQGAGNSNVDLDNVMITSEEEIKTTNPVATEEYGTVATNLQSSNTAPATGTVNSQGALPGMVWQERDVYLQGPIWAKIPHTDGHFHPSPLMGGFGLKHPPPQILIKNTPVPANPPTTFSPAKFASFITQYSTGQVSVEIEWELQKENSKRWNPEIQYTSNYNKSTNVDFAVDTNGVYSEPRPIGTRYLTRNL

SEQ ID NO: 931 - protein, 736 aa, Artificial Sequence
  Description of Artificial Sequence: Synthetic polypeptide
MAADGYLPDWLEDNLSEGIREWWDLKPGAPKPKANQQKQDDGRGLVLPGYKYLGPFNGLDKGEPVNAADAAALEHDKAYDQQLKAGDNPYLRYNHADAEFQERLQEDTSFGGNLGRAVFQAKKRVLEPLGLVEEGAKTAPGKKRPVEQSPQEPDSSSGIGKKGQQPARKRLNFGQTGDSESVPDPQPLGEPPAAPSGVGSNTMASGGGAPMADNNEGADGVGNASGNWHCDSTWLGDRVITTSTRTWALPTYNNHLYKQISSQSGGSTNDNTYFGYSTPWGYFDFNRFHCHFSPRDWQRLINNNWGFRPKKLNFKLFNIQVKEVTTNDGTTTIANNLTSTVQVFTDSEYQLPYVLGSAHQGCLPPFPADVFMIPQYGYLTLNNGSQAVGRSSFYCLEYFPSQMLRTGNNFEFSYTFEDVPFHSSYAHSQSLDRLMNPLIDQYLYYLSRTQTTSGTAGNRELQFSQAGPSSMANQAKNWLPGPCYRQQRVSKTTNQNNNSNFAWTGATKYHLNGRDSLVNPGPAMATHKDDEDKFFPMSGVLIFGKQGAGNSNVDLDNVMITSEEEIKTTNPVATEEYGTVATNLQSANTAPATGTVNSQGALPGMVWQDRDVYLQGPIWAKIPHTDGHFHPSPLMGGFGLKHPPPQILIKNTPVPANPPTTFSPAKFASFITQYSTGQVSVEIEWELQKENSKRWNPEIQYTSNYNKSTNVDFAVDTNGVYSEPRPIGTRYLTRNL

SEQ ID NO: 932 - protein, 736 aa, Artificial Sequence
  Description of Artificial Sequence: Synthetic polypeptide
MAADGYLPDWLEDNLSEGIREWWDLKPGAPKPKANQQKQDDGRGLVLPGYKYLGPFNGLDKGEPVNAADAAALEHDKAYDQQLKAGDNPYLRYNHADAEFQERLQEDTSFGGNLGRAVFQAKKRVLEPLGLVEEGAKTAPGKKRPVEQSPQEPDSSSGIGKKGQQPARKRLNFGQTGDSESVPDPQPLGEPPAAPSGVGSNTMAAGGGAPMADNNEGADGVGNASGNWHCDSTWLGDRVITTSTRTWALPTYNNHLYKQISSQSGGSTNDNTYFGYSTPWGYFDFNRFHCHFSPRDWQRLINNNWGFRPKKLNFKLFNIQVKEVTTNDGTTTIANNLTSTVQVFTDSEYQLPYVLGSAHQGCLPPFPADVFMIPQYGYLTLNNGSQAVGRSSFYCLEYFPSQMLRTGNNFQFSYTFEDVPFHSSYAHSQSLDRLMNPLIDQYLYYLSRTQTTSGTAGNRTLQFSQAGPSSMANQAKNWLPGPCYRQQRVSKTTNQNNNSNFAWTGATKYHLNGRDSLVNPGPAMATHKDDEDKFFPMSGVLIFGKQGAGNSNVDLDNVMITNEEEIKTTNPVATEEYGTVATNLQSANTAPATGTVNSQGALPGMVWQDRDVYLQGPIWAKIPHTDGHFHPSPLMGGFGLKHPPPQILIKNTPVPANPPTTFSPAKFASFITQYSTGQVSVEIEWELQKENSKRWNPEIQYTSNYNKSTNVDFAVDTNGVYSEPRPIGTRYLTRNL

SEQ ID NO: 933 - protein, 736 aa, Artificial Sequence
  Description of Artificial Sequence: Synthetic polypeptide
MAADGYLPDWLEDNLSEGIREWWDLKPGAPKPKANQQKQDDGRGLVLPGYKYLGPFNGLDKGEPVNAADAAALEHDKAYDQQLKAGDNPYLRYNHADAEFQERLQEDTSFGGNLGRAVFQAKKRVLEPLGLVEEGAKTAPGKKRPVEQSPQEPDSSSGIGKKGQQPAKKRLNFGQTGDSESVPDPQPLGEPPAAPSGVGSNTMAAGGGAPMADNNEGADGVGNASGNWHCDSTWLGDRVITTSTRTWALPTYNNHLYKQISSQSGGSTNDNTYFGYSTPWGYFDFNRFHCHFSPRDWQRLINNNWGFRPKKLNFKLFNIQVKEVTTNDGTTTIANNLTSTVQVFTDSEYQLPYVLGSAHQGCLPPFPADVFMIPQYGYLTLNNGSQAVGRSSFYCLEYFPSQMLRTGNNFEFSYTFEDVPFHSSYAHSQSLDRLMNPLIDQYLYYLSRTQTTSGTAGNRTLQFSQAGPSSMANQAKNWLPGPCYRQQRVSKTANQNNNSNFAWTGATKYHLNGRDSLVNPGPAMATHKDDEDKFFPMSGVLIFGKQGAGNSNVDLDNVMITSEEEIKTTNPVATEQYGTVATNLQSSNTAPATGTVNSQGALPGMVWQNRDVYLQGPIWAKIPHTDGHFHPSPLMGGFGLKHPPPQILIKNTPVPANPPTTFSPAKFASFITQYSTGQVSVEIEWELQKENSKRWNPEIQYTSNYNKSTNVDFAVDTNGVYSEPRPIGTRYLTRNL

SEQ ID NO: 934 - protein, 736 aa, Artificial Sequence
  Description of Artificial Sequence: Synthetic polypeptide
MAADGYLPDWLEDNLSEGIREWWDLKPGAPKPKANQQKQDDGRGLVLPGYKYLGPFNGLDKGEPVNAADAAALEHDKAYDQQLKAGDNPYLRYNHADAEFQERLQEDTSFGGNLGRAVFQAKKRVLEPLGLVEEGAKTAPGKKRPVEQSPQEPDSSSGIGKKGQQPAKKRLNFGQTGDSESVPDPQPLGEPPAAPSGVGSNTMASGGGAPMADNNEGADGVGNASGNWHCDSTWLGDRVITTSTRTWALPTYNNHLYKQISSQSGGSTNDNTYFGYSTPWGYFDFNRFHCHFSPRDWQRLINNNWGFRPKKLNFKLFNIQVKEVTTNDGTTTIANNLTSTVQVFTDSEYQLPYVLGSAHQGCLPPFPADVFMIPQYGYLTLNNGSQAVGRSSFYCLEYFPSQMLRTGNNFEFSYTFEDVPFHSSYAHSQSLDRLMNPLIDQYLYYLSRTQTTSGTAGNRTLQFSQAGPSSMANQAKNWLPGPCYRQQRVSKTANQNNNSNFAWTGATKYHLNGRDSLVNPGPAMATHKDDEDKFFPMSGVLIFGKQGAGNSNVDLDNVMITSEEEIKTTNPVATEEYGTVATNLQSSNTAPATGTVNSQGALPGMVWQNRDVYLQGPIWAKIPHTDGHFHPSPLMGGFGLKHPPPQILIKNTPVPANPPTTFSPAKFASFITQYSTGQVSVEIEWELQKENSKRWNPEIQYTSNYNKSTNVDFAVDTNGVYSEPRPIGTRYLTRNL

SEQ ID NO: 935 - protein, 736 aa, Artificial Sequence
  Description of Artificial Sequence: Synthetic polypeptide
MAADGYLPDWLEDNLSEGIREWWDLKPGAPKPKANQQKQDDGRGLVLPGYKYLGPFNGLDKGEPVNAADAAALEHDKAYDQQLKAGDNPYLRYNHADAEFQERLQEDTSFGGNLGRAVFQAKKRVLEPLGLVEEGAKTAPGKKRPVEQSPQEPDSSSGIGKKGQQPAKKRLNFGQTGDSESVPDPQPLGEPPAAPSGVGSNTMASGGGAPMADNNEGADGVGNASGNWHCDSTWLGDRVITTSTRTWALPTYNNHLYKQISSQSGGSTNDNTYFGYSTPWGYFDFNRFHCHFSPRDWQRLINNNWGFRPKKLNFKLFNIQVKEVTTNDGTTTIANNLTSTVQVFTDSEYQLPYVLGSAHQGCLPPFPADVFMIPQYGYLTLNNGSQAVGRSSFYCLEYFPSQMLRTGNNFQFSYTFEDVPFHSSYAHSQSLDRLMNPLIDQYLYYLSRTQTTSGTAGNRELQFSQAGPSSMANQAKNWLPGPCYRQQRVSKTTNQNNNSNFAWTGATKYHLNGRDSLVNPGPAMATHKDDEDKFFPMSGVLIFGKQGAGNSNVDLDNVMITNEEEIKTTNPVATEQYGTVATNLQSANTAPATGTVNSQGALPGMVWQDRDVYLQGPIWAKIPHTDGHFHPSPLMGGFGLKHPPPQILIKNTPVPANPPTTFSPAKFASFITQYSTGQVSVEIEWELQKENSKRWNPEIQYTSNYNKSTNVDFAVDTNGVYSEPRPIGTRYLTRNL

SEQ ID NO: 936 - DNA, 2211 bp, Artificial Sequence
  Description of Artificial Sequence: Synthetic polynucleotide
atggctgccgatggttatcttccagattggctcgaggacaacctctctgagggcattcgcgagtggtgggacttgaaacctggagccccgaaacccaaagccaaccagcaaaagcaggacgacggccggggtctggtgcttcctggctacaagtacctcggacccttcaacggactcgacaagggggagcccgtcaacgcggcggacgcagcggccctcgagcacgacaaggcctacgaccagcagctcaaagcgggtgacaatccgtacctgcggtataaccacgccgacgccgagtttcaggagcgtctgcaagaagatacgtcttttgggggcaacctcgggcgagcagtcttccaggccaagaagcgggttctcgaacctctcggtctggttgaggaaggcgctaagacggctcctggaaagaagagaccggtagagcaatcaccccaggaaccagactcctcttcgggcatcggcaagaaaggccagcagcccgcgaaaaagagactcaactttgggcagacaggcgactcagagtcagtgcccgaccctcaaccactcggagaaccccccgcagccccctctggtgtgggatctaatacaatggctgcaggcggtggcgctccaatggcagacaataacgaaggcgccgacggagtgggtaacgcctcaggaaattggcattgcgattccacatggctgggcgacagagtcatcaccaccagcacccgaacctgggccctccccacctacaacaaccacctctacaagcaaatctccagccaatcgggagcaagcaccaacgacaacacctacttcggctacagcaccccctgggggtattttgactttaacagattccactgccacttctcaccacgtgactggcagcgactcatcaacaacaactggggattccggcccaagagactcaacttcaagctcttcaacatccaggtcaaggaggtcacgacgaatgatggcaccacgaccatcgccaataaccttaccagcacggttcaggtctttacggactcggaataccagctcccgtacgtcctcggctctgcgcaccagggctgcctgcctccgttcccggcggacgtcttcatgattcctcagtacgggtacctgactctgaacaatggcagtcaggccgtgggccgttcctccttctactgcctggagtactttccttctcaaatgctgagaacgggcaacaactttgagttcagctacacgtttgaggacgtgccttttcacagcagctacgcgcacagccaaagcctggaccggctgatgaaccccctcatcgaccagtacctgtactacctgtctcggactcagaccacgagtggtaccgcaggaaatcggacgttgcaattttctcaggccgggcctagtagcatggcgaatcaggccaaaaactggctacccgggccctgctaccggcagcaacgcgtctccaagacagcgaatcaaaataacaacagcaactttgcctggaccggtgccaccaagtatcatctgaatggcagagactctctggtaaatcccggtcccgctatggcaacccacaaggacgacgaagacaaattttttccgatgagcggagtcttaatatttgggaaacagggagctggaaatagcaacgtggaccttgacaacgttatgataaccagtgaggaagaaattaaaaccaccaacccagtggccacagaacagtacggcacggtggccactaacctgcaatcgtcaaacaccgctcctgctacagggaccgtcaacagtcaaggagccttacctggcatggtctggcagaaccgggacgtgtacctgcagggtcctatctgggccaagattcctcacacggacggacactttcatccctcgccgctgatgggaggctttggactgaaacacccgcctcctcagatcctgattaagaatacacctgttcccgcgaatcctccaactaccttcagtccagctaagtttgcgtcgttcatcacgcagtacagcaccggacaggtcagcgtggaaattgaatgggagctgcagaaagaaaacagcaaacgctggaacccagagattcaatacacttccaactacaacaaatctacaaatgtggactttgctgttgacacaaatggcgtttattctgagcctcgccccatcggcacccgttacctcacccgtaatctgtaa

SEQ ID NO: 937 - protein, 738 aa, Artificial Sequence; identical to SEQ ID NO: 16
  Description of Artificial Sequence: Synthetic polypeptide

SEQ ID NO: 938 - DNA, 2211 bp, Artificial Sequence
  Description of Artificial Sequence: Synthetic polynucleotide
atggctgccgatggttatcttccagattggctcgaggacaacctctctgagggcattcgcgagtggtgggacttgaaacctggagccccgaaacccaaagccaaccagcaaaagcaggacgacggccggggtctggtgcttcctggctacaagtacctcggacccttcaacggactcgacaagggggagcccgtcaacgcggcggacgcagcggccctcgagcacgacaaggcctacgaccagcagctcaaagcgggtgacaatccgtacctgcggtataaccacgccgacgccgagtttcaggagcgtctgcaagaagatacgtcttttgggggcaacctcgggcgagcagtcttccaggccaagaagcgggttctcgaaccttttggtctggttgaggaaggcgctaagacggctcctggaaagaaacgtccggtagagcagtcgccacaagagccagactcctcctcgggcatcggcaagacaggccagcagcccgctaaaaagagactcaattttggtcagactggcgactcagagtcagtccccgacccacaacctctcggagaacctccagcaacccccgctgctgtgggacctactacaatggcttcaggcggtggcgcaccaatggcagacaataacgaaggcgccgacggagtgggtaatgcctcaggaaattggcattgcgattccacatggctgggcgacagagtcatcaccaccagcacccgcacctgggccttgcccacctacaataaccacctctacaagcaaatctccagtgcttcaacgggggccagcaacgacaaccactacttcggctacagcaccccctgggggtattttgatttcaacagattccactgccacttttcaccgcgtgactggcagcgactcatcaacaacaattggggattccggcccaagagactcaacttcaagctcttcaacatccaagtcaaggaggtcacgacgagtgatggcgtcacaaccatcgctaataaccttaccagcacggttcaagtcttctcggactcggagtaccagcttccgtacgtcctcggctctgcgcaccagggctgcctccctccgttcccggcggacgtgttcatgattccgcaatacggctacctgacgctcaacaatggcagccaagccgtgggacgttcatccttttactgcctggaatatttcccttctcagatgctgagaacgggcaacaactttaccttcagctacacctttgaggaagtgcctttccacagcagctacgcgcacagccagagcctggaccggctgatgaatcctctcatcgaccaatacctgtattacctgaacagaactcaaaatcagtccggaagtgcccaaaacaaggacttgctgtttagccgtgggtctccagctggcatgtctgttcagcccaaaaactggctacctggaccctgttatcggcagcagcgcgtttctaaaacaaaaacaggcaacaacaacagcaattttacctggactggtgcttcaaaatataacctcaatgggcatgaatccatcatcaaccctggcactgctatggcctcacacaaagacgacgaagacaagttctttcccatgagcggtgtcatgatttttggaaaagagagcgccggagcttcaaacactgcattggacaatgtcatgattacagacgaagaggaaattaaagccactaaccctgtggccaccgaaagatttgggaccgtggcagtcaatttccagagcagcagcacacaccctgcgaccggagatgtgcatgttatgggagcattacctggcatggtgtggcaagatagagacgtgtacctgcagggtcccatctgggccaaaattcctcacacagatggacactttcacccgtctcctcttatgggcggctttggactcaagcacccgcctcctcagatcctcatcaaaaacacgcctgttcctgcgaatcctccggcggagttttcagctacaaagtttgcttcattcatcacccaatactccacaggacaagtgagtgtggaaattgaatgggagctgcagaaagaaaacagcaagcgctggaatcccgaagtgcagtacacatccaattatgcaaaatctgccaacgttgattttaccgtggacaacaatggactttatactgagcctcgccccattggcacccgttaccttacccgtcccctgtaa

SEQ ID NO: 939 - DNA, 2211 bp, Artificial Sequence; identical to SEQ ID NO: 938
  Description of Artificial Sequence: Synthetic polynucleotide

SEQ ID NO: 940 - DNA, 2202 bp, Artificial Sequence
  Description of Artificial Sequence: Synthetic polynucleotide
atgactgacggttaccttccagattggctagaggacaacctctctgaaggcgttcgagagtggtgggcgctgcaacctggagcccctaaacccaaggcaaatcaacaacatcaggacaacgctcggggtcttgtgcttccgggttacaaatacctcggacccggcaacggacttgacaagggggaacccgtcaacgcagcggacgcggcagccctcgaacacgacaaggcctacgaccagcagctcaaggccggtgacaacccctacctcaagtacaaccacgccgacgccgagtttcaggagcgtcttcaagaagatacgtcttttgggggcaacctcggacgagcagtcttccaggccaaaaagaggatccttgagcctctgggtctggttgaggaagcggctaagacggctcctggaaaaaagagacctgtagagcaatctccagcagaaccggactcctcttcgggcatcggcaaatcaggccagcagcccgctagaaaaagactgaattttggtcagactggcgacacagagtcagtcccagaccctcaaccactcggacaacctcccgcagccccctctggtgtgggatctactacaatggcttcaggcggtggcgcaccaatggcagacaataacgagggtgccgatggagtgggtaattcctcaggaaattggcattgcgattcccaatggctgggcgacagagtcatcaccaccagcacccgcacctgggccctgcccacctacaacaatcacctctacaagcaaatctccagccaatcaggagccaccaacgacaaccactactttggctacagcaccccctgggggtattttgacttcaacagattccactgccacttttcaccacgtgactggcaaagactcatcaacaacaactggggattccgacccaagagactcaacttcaagctctttaacattcaagtcaaagaggtcacgcagaatgacggtacgacgacgattgccaataaccttaccagcacggttcaggtgtttactgactccgagtaccagctcccgtacgtcctcggctcggcgcatcagggatgcctcccgccgttcccagcagacgtcttcatggtcccacagtatggatacctcaccctgaacaacgggagtcaggcggtaggacgctcttccttttactgcctggagtactttccttctcagatgctgcgtactggaaacaactttcagtttagctacacttttgaagacgtgcctttccacagcagctacgctcacagccaaagtctggaccgtctcatgaatcctctgatcgaccagtacctgtactatctgaacaggacacaaacagccagtggaactcagcagtctcggctactgtttagccaagctggacccaccagtatgtctcttcaagctaaaaactggctgcctggaccttgctacagacagcagcgtctgtcaaagcaggcaaacgacaacaacaacagcaactttccctggactggtgccaccaaatatcatctgaatggccgggactcattggtgaacccgggccctgctatggccagtcacaaggatgacaaagaaaagtttttccccatgcatggaaccctgatatttggtaaagaaggaacaaatgccaacaacgcggatttggaaaatgtcatgattacagatgaagaagaaatccgcaccaccaatcccgtggctacggagcagtacgggactgtgtcaaataatttgcaaaactcaaacgctggtccaactactggaactgtcaatcaccaaggagcgttacctggtatggtgtggcaggatcgagacgtgtacctgcagggacccatttgggccaagattcctcacaccgatggacactttcatccttctccactgatgggaggttttgggctcaaacacccgcctcctcagatcatgatcaaaaacactcccgttccagccaatcctcccacaaactttagtgcggcaaagtttgcttccttcatcacacagtactccacggggcaggtcagcgtggagatcgagtgggagctgcagaaggagaacagcaaacgctggaatcccgaaattcagtacacttccaactacaacaaatctgttaatgtggactttactgtggacactaatggtgtgtattcagagcctcgccccattggcaccagatacctgactcgtaatctgtaa

SEQ ID NO: 941 - DNA, 2211 bp, Artificial Sequence
  Description of Artificial Sequence: Synthetic polynucleotide
atggctgccgatggttatcttccagattggctcgaggacaacctctctgagggcattcgcgagtggtgggacttgaaacctggagccccgaaacccaaagccaaccagcaaaagcaggacgacggccggggtctggtgcttcctggctacaagtacctcggacccttcaacggactcgacaagggggagcccgtcaacgcggcggacgcagcggccctcgagcacgacaaggcctacgaccagcagctcaaagcgggtgacaatccgtacctgcggtataaccacgccgacgccgagtttcaggagcgtctgcaagaagatacgtcttttgggggcaacctcgggcgagcagtcttccaggccaagaagcgggttctcgaaccttttggtctggttgaggaaggcgctaagacggctcctggaaagaaacgtccggtagagcagtcgccacaagagccagactcctcctcgggcatcggcaagacaggccagcagcccgctaaaaagagactcaattttggtcagactggcgactcagagtcagtccccgacccacaacctctcggagaacctccagcaacccccgctgctgtgggacctactacaatggcttcaggcggtggcgcaccaatggcagacaataacgaaggcgccgacggagtgggtaatgcctcaggaaattggcattgcgattccacatggctgggcgacagagtcatcaccaccagcacccgcacctgggccttgcccacctacaataaccacctctacaagcaaatctccagtgcttcaacgggggccagcaacgacaaccactacttcggctacagcaccccctgggggtattttgatttcaacagattccactgccacttttcaccacgtgactggcagcgactcatcaacaacaattggggattccggcccaagagactcaacttcaagctcttcaacatccaagtcaaggaggtcacgacgaatgatggcgtcacaaccatcgctaataaccttaccagcacggttcaagtcttctcggactcggagtaccagcttccgtacgtcctcggctctgcgcaccagggctgcctccctccgttcccggcggacgtgttcatgattccgcaatacggctacctgacgctcaacaatggcagccaagccgtgggacgttcatccttttactgcctggaatatttcccttctcagatgctgagaacgggcaacaactttaccttcagctacacctttgaggaagtgcctttccacagcagctacgcgcacagccagagcctggaccggctgatgaatcctctcatcgaccaatacctgtattacctgaacagaactcaaaatcagtccggaagtgcccaaaacaaggacttgctgtttagccgtgggtctccagctggcatgtctgttcagcccaaaaactggctacctggaccctgttatcggcagcagcgcgtttctaaaacaaaaacagacaacaacaacagcaattttacctggactggtgcttcaaaatataacctcaatgggcgtgaatccatcatcaaccctggcactgctatggcctcacacaaagacgacgaagacaagttctttcccatgagcggtgtcatgatttttggaaaagagagcgccggagcttcaaacactgcattggacaatgtcatgattacagacgaagaggaaattaaagccactaaccctgtggccaccgaaagatttgggaccgtggcagtcaatttccagagcagcagcacagaccctgcgaccggagatgtgcatgttatgggagcattacctggcatggtgtggcaagatagagacgtgtacctgcagggtcccatctgggccaaaattcctcacacagatggacactttcacccgtctcctcttatgggcggctttggactcaagcacccgcctcctcagatcctcatcaaaaacacgcctgttcctgcgaatcctccggcggagttttcagctacaaagtttgcttcattcatcacccaatactccacaggacaagtgagtgtggaaattgaatgggagctgcagaaagaaaacagcaagcgctggaatcccgaagtgcagtacacatccaattatgcaaaatctgccaacgttgattttaccgtggacaacaatggactttatactgagcctcgccccattggcacccgttaccttacccgtcccctgtaa

SEQ ID NO: 942 - DNA, 2211 bp, Artificial Sequence
  Description of Artificial Sequence: Synthetic polynucleotide
atggctgccgatggttatcttccagattggctcgaggacaacctctctgagggcattcgcaagtggtgggacttgaaacctggagccccgaaacccaaagccaaccagcaaaagcaggacgacggccggggtctggtgcttcctggctacaagtacctcggacccttcaacggactcgacaagggggagcccgtcaacgcggcggacgcagcggccctcgagcacgacaaggcctacgaccagcagctcaaagcgggtgacaatccgtacctgcggtataaccacgccgacgccgagtttcaggagcgtctgcaagaagatacgtcttttgggggcaacctcgggagagcagtcttccaggccaagaagcgggttctcgaaccttttggtctggttgaggaaggcgctaagacggctcctggaaagaaacgtccggtagagcagtcgccacaagagccagactcctcctcgggcatcggcaagacaggccagcagcccgctaaaaagagactcaattttggtcagactggcgactcagagtcagtccccgacccacaacctctcggagaacctccagcaacccccgctgctgtgggacctactacaatggcttcaggcggtggcgcaccaatggcagacaataacgaaggcgccgacggagtgggtaatgcctcaggaaattggcattgcgattccacatggctgggcgacagagtcatcaccaccagcacccgcacctgggccttgcccacctacaataaccacctctacaagcaaatctccagtgcttcaacgggggccagcaacgacaaccactacttcggctacagcaccccctgggggtattttgatttcaacagattccactgccacttttcaccacgtgactggcagcgactcatcaacaacaattggggattccggcccaagagactcaacttcaagctcttcaacatccaagtcaaggaggtcacgacgaatgatggcgtcacaaccatcgctaataaccttaccagcacggttcaagtcttctcggactcggagtaccagcttccgtacgtcctcggctctgcgcaccagggctgcctccctccgttcccggcggacgtgttcatgattccgcaatacggctacctgacgctcaacaatggcagccaagccgtgggacgttcatccttttactgcctggaatatttcccttctcagatgctgagaacgggcaacaactttaccttcagctacacctttgaggaagtgcctttccacagcagctacgcgcacagccagagcctggaccggctgatgaatcctctcatcgaccaatacctgtattacctgaacagaactcaaaatcagtccggaagtgcccaaaacaaggacttgctgtttagccgtgggtctccagctggcatgtctgttcagcccaaaaactggctacctggaccctgttatcggcagcagcgcgtttctaaaacaaaaacagacaacaacaacagcaattttacctggactggtgcttcaaaatataacctcaatgggcgtgaatccatcatcaaccctggcactgctatggcctcacacaaagacgacaaagacaagttctttcccatgagcggtgtcatgatttttggaaaagagagcgccggagcttcaaacactgcattggacaatgtcatgattacagacgaagaggaaattaaagccactaaccctgtggccaccgaaagatttgggaccgtggcagtcaatttccagagcagcagcacagaccctgcgaccggagatgtgcatgttatgggagcattacctggcatggtgtggcaagatagagacgtgtacctgcagggtcccatttgggccaaaattcctcacacagatggacactttcacccgtctcctcttatgggcggctttggactcaagcacccgcctcctcagatcctcatcaaaaacacacctgttcctgcgaatcctccggcggagttttcagctacaaagtttgcttcattcatcacccaatactccacaggacaagtgagtgtggaaattgaatgggagctgcagaaagaaaacagcaagcgctggaatcccgaagtgcagtacacatccaattatgcaaaatctgccaacgttgattttaccgtggacaacaatggactttatactgagcctcgccccattggcacccgttaccttacccgtcccctgtaa

SEQ ID NO: 943 - DNA, 2211 bp, Artificial Sequence
  Description of Artificial Sequence: Synthetic polynucleotide
atggctgccgatggttatcttccagattggctcgaggacaacctctctgagggcattcgcgagtggtgggacttgaaacctggagccccgaaacccaaagccaaccagcaaaagcaggacaacggccggggtctggtgcttcctggctacaagtacctcggacccttcaacggactcgacaagggggagcccgtcaacgcggcggacgcagcggccctcgagcacgacaaggcctacgaccagcagctcaaagcgggtgacaatccgtacctgcggtataaccacgccgacgccgagtttcaggagcgtctgcaagaagatacgtcttttgggggcaacctcgggcgagcagtcttccaggccaagaagcgggttctcgaaccttttggtctggttgaggaaggcgctaagacggctcctggaaagaaacgtccggtagagcagtcgccacaagagccagactcctcctcgggcatcggcaagacaggccagcagcccgctaaaaagagactcaattttggtcagactggcgactcagagtcagtccccgacccacaacctctcggagaacctccagcaacccccgctgctgtgggacctactacaatggcttcaggcggtggcgcaccaatggcagacaataacgaaggcgccgacggagtgggtaatgcctcaggaaattggcattgcgattccacatggctgggcgacagagtcatcaccaccagcacccgcacctgggccttgcccacctacaataaccacctctacaagcaaatctccagtgcttcaacgggggccagcaacgacaaccactacttcggctacagcaccccctgggggtattttgatttcaacagattccactgccacttttcaccacgtgactggcagcgactcatcaacaacaattggggattccggcccaagagactcaacttcaagctcttcaacatccaagtcaaggaggtcacgacgaatgatggcgtcacaaccatcgctaataaccttaccagcacggttcaagtcttctcggactcggagtaccagcttccgtacgtcctcggctctgcgcaccagggctgcctccctccgttcccggcggacgtgttcatgattccgcaatacggctacctgacgctcaacaatggcagccaagccgtgggacgttcatccttttactgcctggaatatttcccttctcagatgctgagaacgggcaacaactttaccttcagctacacctttgaggaagtgcctttccacagcagctacgcgcacagccagagcctggaccggctgatgaatcctctcatcgaccaatacctgtattacctgaacagaactcaaaatcagtccggaagtgcccaaaacaaggacttgctgtttagccgtgggtctccagctggcatgtctgttcagcccaaaaactggctacctggaccctgttatcggcagcagcgcgtttctaaaacaaaaacagacaacaacaacagcaattttacctggactggtgcttcaaaatataacctcaatgggcgtgaatccatcatcaaccctggcactgctatggcctcacacaaagacgacgaagacaagttctttcccatgagcggtgtcatgatttttggaaaagagagcgccggagcttcaaacactgcattggacaatgtcatgattacagacgaagaggaaattaaagccactaaccctgtggccaccgaaagatttgggaccgtggcagtcaatttccagagcagcagcacacaccctgcgaccggagatgtgcatgttatgggagcattacctggcatggtgtggcaagatagagacgtgtacctgcagggtcccatctgggccaaaattcctcacacagatggacactttcacccgtctcctcttatgggcggctttggactcaagcacccgcctcctcagatcctcatcaaaaacacgcctgttcctgcgaatcctccggcggagttttcagctacaaagtttgcttcattcatcacccaatactccacaggacaagtgagtgtggaaattgaatgggagctgcagaaagaaaacagcaagcgctggaatcccgaagtgcagtacacatccaattatgcaaaatctgccaacgttgattttaccgtggacaacaatggactttatactgagcctcgccccattggcacccgttaccttacccgtcccctgtaa

SEQ ID NO: 944 - DNA, 2211 bp, Artificial Sequence
  Description of Artificial Sequence: Synthetic polynucleotide
atggctgccgatggttatcttccagattggctcgaggacaacctctctgagggcattcgcgagtggtgggacttgaaacctggagccccgaaacccaaagccaaccagcaaaagcaggacgacggccggggtctggtgcttcctggctacaagtacctcggacccttcaacggactcgacaagggggagcccgtcaacgcggcggacgcagcggccctcgagcacgacaaggcctacgaccagcagctcaaagcgggtgacaatccgtacctgcggtataaccacgccgacgccgagtttcaggagcgtctgcaagaagatacgtcttttgggggcaacctcgggcgagcagtcttccaggccaaaaagcgggttctcgaaccttttggtctggttgaggaaggcgctaagacggctcctggaaagaaacgtccggtagagcagtcgccacaagagccagactcctcctcgggcatcggcaagacaggccagcagcccgctaaaaagagactcaattttggtcagactggcgactcagagtcagtccccgacccacaacctctcggagaacctccagcaacccccgctgctgtgggacctactacaatggcttcaggcggtggcgcaccaatggcagacaataacgaaggcgccgacggagtgggtaatgcctcaggaaattggcattgcgattccacatggctgggcgacagagtcatcaccaccagcacccgcacctgggccttgcccacctacaataaccacctctacaagcaaatctccagtgcttcaacgggggccagcaacgacaaccactacttcggctacagcaccccctgggggtattttgatttcaacagattccactgccacttttcaccacgtgactggcagcgactcatcaacaacaattggggattccggcccaagagactcaacttcaagctcttcaacatccaagtcaaggaggtcacgacgaatgatggcgtcacaaccatcgctaataaccttaccagcacggttcaagtcttctcggactcggagtaccagcttccgtacgtcctcggctctgcgcaccagggctgcctccctccgttcccggcggacgtgttcatgattccgcaatacggctacctgacgctcaacaatggcagccaagccgtgggacgttcatccttttattgcctggaatatttcccatcgcagatgctgagaacgggcaataactttaccttcagctacacctttgaggacgtgcctttccacagcagctacgcgcacagccagagcctggaccggctgatgaatcctctcatcgaccagtacctgtattacctgaacagaactcagaaccagtccggaagtgcccaaaacaaggacttgctgtttagccgggggtctccagctggcatgtctgttcagctcaaaaactggctacctggaccctgttatcggcagcagcgcgtttctaaaacaaaaacagacaacaacaacagcaattttacctggactggtgcttcaaaatataaccttaatgggcgtgaatccatcatcaaccctggcactgctatggcctcacacaaagacgacgaagacaagttctttcccatgagcggtgtcatgatttttggaaaagagagcgccggagcttcaaacactgcattggacaatgtcatgattacagacgaagaggaaattaaagccactaaccctgtggccaccgaaagatttgggaccgtggcagtcaatttccagagcagcagcacagaccctgcgaccggagatgtgcatgttatgggagcattacctggcatggtgtggcaagatagagacgtgtacctgcagggtcccatttgggccaaaattcctcacacagatggacactttcacccgtctcctcttatgggcggctttggactcaaacacccgcctcctcagatcctcatcaaaaacacacctgttcctgcgaatcctccggcggagttttcagctacaaagtttgcttcattcatcacccaatactccacaggacaagtgagcgtggaaattgaatgggagctgcagaaagaaaacagcaagcgctggaatcccgaagtgcagtacacatccaattatgcaaaatctgccaacgttgattttaccgtggacaacaatggactttatactgagcctcgccccattggcacccgttaccttacccgtcccctgtaa

SEQ ID NO: 945 - DNA, 2211 bp, Artificial Sequence
  Description of Artificial Sequence: Synthetic polynucleotide
atggctgccgatggttatcttccagattggctcgaggacaacctctctgagggcattcgcgagtggtgggacttgaaacctggagccccgaaacccaaagccaaccagcaaaagcaggacgacggccggggtctggtgcttcctggctacaagtacctcggacccttcaacggactcgacaagggggagcccgtcaacgcggcggacgcagcggccctcgagcacgacaaggcctacgaccagcagctcaaagcgggtgacaatccgtacctgcggtataaccacgccgacgccgagtttcaggagcgtctgcaagaagatacgtcttttgggggcaacctcgggcgagcagtcttccaggccaagaagcgggttctcgaaccttttggtctggttgaggaaggtgctaagacggctcctggaaagaagagaccggtagagcagtcgccccaagaaccagactcctcatcgggcatcggcaaatcaggccagcagcccgctaaaaagagactcaattttggtcagactggcgactcagagtcagtccccgacccacaacctctcggagaacctccagcaacccccgctgctgtgggacctactacaatggcttcaggcggtggcgcaccaatggcagacaataacgaaggcgccgacggagtgggtaatgcctcaggaaattggcattgcgattccacatggctgggcgacagagtcattaccaccagcacccgaacctgggccctgcccacctataacaaccacctctacaaacaaatctccagcgcttcaacgggggccagcaacgacaaccactacttcggctacagcaccccctgggggtattttgattttaacagattccactgccacttctcaccacgtgactggcagcgactcatcaacaacaattggggattccggcccaagagactcaacttcaagctcttcaacatccaagtcaaggaggtcacgacgaacgatggcgtcacgaccatcgctaataaccttaccagcacggttcaagtcttctcggactcggagtaccagttgccgtacgtcctcggctctgcgcaccagggctgcctccctccgttcccggcggacgtgttcatgattccgcagtacggctacctaacactcaacaatggcagccaggccgtgggacgttcatccttttactgcctggaatatttcccatcgcagatgctgagaacgggcaataactttaccttcagctacacattcgaggacgtgcctttccacagcagctacgcgcacagccaaagcctggaccggctgatgaatcctctcatcgaccagtacttgtattacctaaacagaactcaaaatcagtccggaagtgcccaaaacaaggacttgctgtttagccgggggtctccagctggcatgtctgttcagcccaaaaactggctacctggaccctgttatcggcagcagcgcgtttctaaaacaaaaacagacaacaacaacagcaactttacctggactggtgcttcaaaatataaccttaatgggcgtgaatctataatcaaccctggcactgctatggcttcacacaaagacgacgaagacaagttctttccaatgagcggtgtcatgatttttggcaaggagagcgccggagcttcaaacactgcattggacaatgtcatgattacagacgaagaggaaattaaagccactaaccctgtggccaccgaaagatttgggaccgtggcagtcaatttccagagcagcagcacagaccctgcgaccggagatgtgcatgttatgggagcattacctggcatggtgtggcaagatagagacgtgtacctgcagggtccaatttgggccaaaattcctcacacagatggacactttcacccgtctcctcttatgggcggctttggacttaagcacccgcctcctcagatcctcatcaaaaacacgcctgttcctgcgaatcctccggcagagttttcggctacaaagtttgcttcattcatcacccagtattccacaggacaagtgagtgtggaaattgaatgggagttgcagaaagaaaacagcaagcgttggaatcccgaagtgcagtacacatctaattatgcaaaatctgccaacgttgatttcactgtggacaacaatggactttatactgagcctcgccccattggcacccgttacctcacccgtcccctgtaa

SEQ ID NO: 946 - DNA, 2211 bp, Artificial Sequence
  Description of Artificial Sequence: Synthetic polynucleotide
atggctgccgatggttatcttccagattggctcgaggacaacctctctgagggcattcgcgagtggtgggacttgaaacctggagccccgaaacccaaagccaaccagcaaaagcaggacgacggccggggtctggtgcttcctggctacaagtacctcggacccttcaacggactcgacaagggggagcccgtcaacgcggcggacgcagcggccctcgagcacgacaaggcctacgaccagcagctcaaagcgggtgacaatccgtacctgcggtataaccacgccgacgccgagtttcaggagcgtctgcaagaagatacgtcttttgggggcaacctcgggcgagcagtcttccaggccaagaagagggttctcgaaccttttggtctggttgaggaaggtgctaagacggctcctggaaagaaacgtccggtagagcagtcaccccaagaaccagactcctcctcgggcattggcaaatcaggccagcagcccgctaaaaagagactcaattttggtcagactggcgactcagagtcagtccccgacccacaacctctcggagaacctccagcaacccccgctgctttgggacctactacaatggcttcaggcggtggcgcaccaatggcagacaataacgaaggcgccgacggagtgggtaatgcctcaggaaattggcattgcgattccacatggctgggcgacagagtcatcaccaccagcacccgcacctgggccttgcccacctacaataaccacctctacaagcaaatctccagtgcttcaacgggggccagcaacgacaaccactacttcggctacagcaccccctgggggtattttgatttcaacagattccactgccatttctcaccacgtgactggcagcgactcatcaacaacaactggggattccggcccaagagactcaacttcaagctcttcaacatccaagtcaaggaggtcacgacgaacgatggcgtcacgaccatcgctaataaccttaccagcacggttcaagtcttctcggactcggagtaccagcttccgtacgtcctcggctctgcgcaccagggctgcctccctccgttcccggcggacgtgttcatgattccgcagtacggctacctgacgctcaacaatggcagcaaagccgtgggacgttcatccttttactgcctggaatatttcccttctcagatgctgagaacgggcaacaactttaccttcagctacacctttgaggaagtgcctttccacagcagctacgcgcacagccagagcctggaccggctgatgaatcctctcatcgaccaatacctgtattacctgaacagaactcaaaatcagtccggaagtgcccaaaacaaggacttgctgtttagccgtgggtctccagctggcatgtctgttcagcccaaaaactggctacctggaccctgttatcggcagcagcgcgtttctaaaacaaaaacagacaacaacaacagcaattttacctggactggtgcttcaaaatataacctcaatgggcgtgaatccatcatcaaccctggcactgctatggcctcacacaaagacgacgaagacaagttctttcccatgagcggtgtcatgatttttggaaaagagagcgccggagcttcaaacactgcattggacaatgtcatgattacagacgaagaggaaattaaagccactaaccctgtggccaccgaaagatttgggaccgtggcagtcaatttccagagcagcagcacagaccctgcgaccggagatgtgcatgttatgggagcattacctggcatggtgtggcaagatagagacgtgtacctgcagggtcccatttgggccaaaattcctcacacggatggacactttcacccgtctcctcttatgggcggctttggactcaagcacccgcctcctcagatcctcatcaaaaacacacctgttcctgcgaatcctccggcagagttttcggctacaaagtttgcttcattcatcacccagtactccacaggacaagtgagcgtggaaattgaatgggagttgcagaaagaaaacagtaagcgctggaatcccgaagtgcagtacacatctaattatgcaaaatctgccaacgttgacttcactgtggacaacaatggactttatactgagcctcgccccattggcacccgttacctcacccgtcccctgtaa

SEQ ID NO: 947 - DNA, 2970 bp, Artificial Sequence
  Description of Artificial Sequence: Synthetic polynucleotide
agatgaccgccaaggtcgtagagtccgccaaggccattctgggcggcagcaaggtgcgcgtggaccaaaaatgcaaggcctctgcgcagatcgaccccacccccgtgatcgtcacctccaacaccaacatgtgcgccgtgattgacgggaacagcaccaccttcgagcaccagcagcccctgcaggaccggatgttcaagtttgaactcacccgccgcctcgactacgactttggcaaggtcaccaagcaggaagtcaaggactttttccggtgggcggctgatcacgtgactgacgtggctcatgagttttacgtcacaaagggtggagctaagaaaaggcccgccccctctgacgaggatataagcgagcccaagcggccgcgcgtgtcatttgcgcagccggagacgtcagacgcggaagctcccggagacttcgccgacaggtaccaaaacaaatgttctcgtcacgcgggtatgctgcagatgctctttccctgcaagacgtgcgagagaatgaatcagaattccaacgtctgcttcacgcacggtcagaaagattgcggggagtgctttcccgggtcagaatctcaaccggtttctgtcgtcagaaaaacgtatcagaaactgtgcatccttcatcagctccggggggcacccgagatcgcctgctctgcttgcgaccaactcaaccccgatttggacgattgccaatttgagcaataaatgactgaaatcaggtatggctgctgacggttatcttccagattggctcgaggacaacctctctgaaggcattcgcgagtggtgggcgctgaaacctggagctccacaacccaaggccaaccaacagcatcaggacaacggcaggggtcttgtgcttcctgggtacaagtacctcggacccttcaacggactcgacaagggagagccggtcaacgaggcagacgccgcggccctcgagcacgacaaggcctacgacaagcagctcgagcagggggacaacccgtatctcaagtacaaccacggcgacgccgagttccagcagcgcttggcgaccgacacctcttttgggggcaacctcgggcgagcagtcttccaggccaaaaagaggattctcgagcctctgggtctggttgaagagggcgttaaaacggctcctggaaagaaacgcccattagaaaagactccaaatcggccgaccaacccggactctgggaaggccccggccaagaaaaagcaaaaagacggcgaaccagccgactctgctagaaggacactcgactttgaagactctggagcaggagacggaccccctgagggatcatcttccggagaaatgtctcatgatgctgagatgcgtgcggcgccaggcggaaatgctgtcgaggcgggacaaggtgccgatggagtgggtaatgcctccggtgattggcattgcgattccacctggtcagagggccgagtcaccaccaccagcacccgaacctgggtcctacccacgtacaacaaccacctgtacctgcgaatcggaacaacggccaacagcaacacctacaacggattctccaccccctggggatactttgactttaaccgcttccactgccacttttccccacgcgactggcagcgactcatcaacaacaactggggactcaggccgaaatcgatgcgtgttaaaatcttcaacatacaggtcaaggaggtcacgacgtcaaacggcgagactacggtcgctaataaccttaccagcacggttcagatctttgcggattcgacgtatgaactcccatacgtgatggacgccggtcaggaggggagctttcctccgtttcccaacgacgtctttatggttccccaatacggatactgcggagttgtcactggaaaaaaccagaaccagacagacagaaatgccttttactgcctggaatactttccatcccaaatgctaagaactggcaacaattttgaagtcagttaccaatttgaaaaagttcctttccattcaatgtacgcgcacagccagagcctggacagaatgatgaatcctttactggatcagtacctgtggcatctgcaatcgaccactaccggaaattcccttaatcaaggaacagctaccaccacgtacgggaaaattaccactggagactttgcctactacaggaaaaactggttgcctggagcctgcattaaacaacaaaaattttcaaagaatgccaatcaaaactacaagattcccgccagcgggggagacgcccttttaaagtatgacacgcataccactctaaatgggcgatggagtaacatggctcctggacctccaatggcaaccgcaggtgccggggactcggattttagcaacagccagctgatctttgccggacccaatccgagcggtaacacgaccacatcttcaaacaatttgttgtttacctcagaagaggagattgccacaacaaacccacgagacacggacatgtttggacagattgcagataataatcaaaatgccaccaccgcccctcacatcgctaacctggacgctatgggaattgttcccggaatggtctggcaaaacagagacatctactaccagggccctatttgggccaaggtccctcacacggacggacactttcacccttcgccgctgatgggaggatttggactgaaacacccgcctccacagattttcatcaaaaacacccccgtacccgccaatcccaatactacctttagcgctgcaaggattaattcttttctgacgcagtacagcaccggacaagttgccgttcagatcgactgggaaattcagaaggagcattccaaacgctggaatcccgaagttcaatttacttcaaactacggcactcaaaattctatgctgtgggctcccgacaatgctggcaactaccacgaactccgggctattgggtcccgtttcctcacccaccacttgtaa

SEQ ID NO: 948 - protein, 736 aa, Artificial Sequence
  Description of Artificial Sequence: Synthetic polypeptide
MAADGYLPDWLEDNLSEGIREWWDLKPGAPKPKANQQKQDDGRGLVLPGYKYLGPFNGLDKGEPVNAADAAALEHDKAYDQQLKAGDNPYLRYNHADAEFQERLQEDTSFGGNLGRAVFQAKKRVLEPFGLVEEGAKTAPGKKRPVEQSPQEPDSSSGIGKTGQQPAKKRLNFGQTGDSESVPDPQPLGEPPATPAAVGPTTMASGGGAPMADNNEGADGVGNASGNWHCDSTWLGDRVITTSTRTWALPTYNNHLYKQISSASTGASNDNHYFGYSTPWGYFDFNRFHCHFSPRDWQRLINNNWGFRPKRLNFKLFNIQVKEVTTSDGVTTIANNLTSTVQVFSDSEYQLPYVLGSAHQGCLPPFPADVFMIPQYGYLTLNNGSQAVGRSSFYCLEYFPSQMLRTGNNFTFSYTFEEVPFHSSYAHSQSLDRLMNPLIDQYLYYLNRTQNQSGSAQNKDLLFSRGSPAGMSVQPKNWLPGPCYRQQRVSKTKTGNNNSNFTWTGASKYNLNGHESIINPGTAMASHKDDEDKFFPMSGVMIFGKESAGASNTALDNVMITDEEEIKATNPVATERFGTVAVNFQSSSTHPATGDVHVMGALPGMVWQDRDVYLQGPIWAKIPHTDGHFHPSPLMGGFGLKHPPPQILIKNTPVPANPPAEFSATKFASFITQYSTGQVSVEIEWELQKENSKRWNPEVQYTSNYAKSANVDFTVDNNGLYTEPRPIGTRYLTRPL

SEQ ID NO: 949 - protein, 736 aa, Artificial Sequence; identical to SEQ ID NO: 948
  Description of Artificial Sequence: Synthetic polypeptide

SEQ ID NO: 950 - protein, 733 aa, Artificial Sequence
  Description of Artificial Sequence: Synthetic polypeptide
MTDGYLPDWLEDNLSEGVREWWALQPGAPKPKANQQHQDNARGLVLPGYKYLGPGNGLDKGEPVNAADAAALEHDKAYDQQLKAGDNPYLKYNHADAEFQERLQEDTSFGGNLGRAVFQAKKRILEPLGLVEEAAKTAPGKKRPVEQSPAEPDSSSGIGKSGQQPARKRLNFGQTGDTESVPDPQPLGQPPAAPSGVGSTTMASGGGAPMADNNEGADGVGNSSGNWHCDSQWLGDRVITTSTRTWALPTYNNHLYKQISSQSGATNDNHYFGYSTPWGYFDFNRFHCHFSPRDWQRLINNNWGFRPKRLNFKLFNIQVKEVTQNDGTTTIANNLTSTVQVFTDSEYQLPYVLGSAHQGCLPPFPADVFMVPQYGYLTLNNGSQAVGRSSFYCLEYFPSQMLRTGNNFQFSYTFEDVPFHSSYAHSQSLDRLMNPLIDQYLYYLNRTQTASGTQQSRLLFSQAGPTSMSLQAKNWLPGPCYRQQRLSKQANDNNNSNFPWTGATKYHLNGRDSLVNPGPAMASHKDDKEKFFPMHGTLIFGKEGTNANNADLENVMITDEEEIRTTNPVATEQYGTVSNNLQNSNAGPTTGTVNHQGALPGMVWQDRDVYLQGPIWAKIPHTDGHFHPSPLMGGFGLKHPPPQIMIKNTPVPANPPTNFSAAKFASFITQYSTGQVSVEIEWELQKENSKRWNPEIQYTSNYNKSVNVDFTVDTNGVYSEPRPIGTRYLTRNL

SEQ ID NO: 951 - protein, 736 aa, Artificial Sequence; identical to SEQ ID NO: 766
  Description of Artificial Sequence: Synthetic polypeptide

SEQ ID NO: 952 - protein, 736 aa, Artificial Sequence
  Description of Artificial Sequence: Synthetic polypeptide
MAADGYLPDWLEDNLSEGIRKWWDLKPGAPKPKANQQKQDDGRGLVLPGYKYLGPFNGLDKGEPVNAADAAALEHDKAYDQQLKAGDNPYLRYNHADAEFQERLQEDTSFGGNLGRAVFQAKKRVLEPFGLVEEGAKTAPGKKRPVEQSPQEPDSSSGIGKTGQQPAKKRLNFGQTGDSESVPDPQPLGEPPATPAAVGPTTMASGGGAPMADNNEGADGVGNASGNWHCDSTWLGDRVITTSTRTWALPTYNNHLYKQISSASTGASNDNHYFGYSTPWGYFDFNRFHCHFSPRDWQRLINNNWGFRPKRLNFKLFNIQVKEVTTNDGVTTIANNLTSTVQVFSDSEYQLPYVLGSAHQGCLPPFPADVFMIPQYGYLTLNNGSQAVGRSSFYCLEYFPSQMLRTGNNFTFSYTFEEVPFHSSYAHSQSLDRLMNPLIDQYLYYLNRTQNQSGSAQNKDLLFSRGSPAGMSVQPKNWLPGPCYRQQRVSKTKTDNNNSNFTWTGASKYNLNGRESIINPGTAMASHKDDKDKFFPMSGVMIFGKESAGASNTALDNVMITDEEEIKATNPVATERFGTVAVNFQSSSTDPATGDVHVMGALPGMVWQDRDVYLQGPIWAKIPHTDGHFHPSPLMGGFGLKHPPPQILIKNTPVPANPPAEFSATKFASFITQYSTGQVSVEIEWELQKENSKRWNPEVQYTSNYAKSANVDFTVDNNGLYTEPRPIGTRYLTRPL

SEQ ID NO: 953 - protein, 736 aa, Artificial Sequence
  Description of Artificial Sequence: Synthetic polypeptide
MAADGYLPDWLEDNLSEGIREWWDLKPGAPKPKANQQKQDNGRGLVLPGYKYLGPFNGLDKGEPVNAADAAALEHDKAYDQQLKAGDNPYLRYNHADAEFQERLQEDTSFGGNLGRAVFQAKKRVLEPFGLVEEGAKTAPGKKRPVEQSPQEPDSSSGIGKTGQQPAKKRLNFGQTGDSESVPDPQPLGEPPATPAAVGPTTMASGGGAPMADNNEGADGVGNASGNWHCDSTWLGDRVITTSTRTWALPTYNNHLYKQISSASTGASNDNHYFGYSTPWGYFDFNRFHCHFSPRDWQRLINNNWGFRPKRLNFKLFNIQVKEVTTNDGVTTIANNLTSTVQVFSDSEYQLPYVLGSAHQGCLPPFPADVFMIPQYGYLTLNNGSQAVGRSSFYCLEYFPSQMLRTGNNFTFSYTFEEVPFHSSYAHSQSLDRLMNPLIDQYLYYLNRTQNQSGSAQNKDLLFSRGSPAGMSVQPKNWLPGPCYRQQRVSKTKTDNNNSNFTWTGASKYNLNGRESIINPGTAMASHKDDEDKFFPMSGVMIFGKESAGASNTALDNVMITDEEEIKATNPVATERFGTVAVNFQSSSTHPATGDVHVMGALPGMVWQDRDVYLQGPIWAKIPHTDGHFHPSPLMGGFGLKHPPPQILIKNTPVPANPPAEFSATKFASFITQYSTGQVSVEIEWELQKENSKRWNPEVQYTSNYAKSANVDFTVDNNGLYTEPRPIGTRYLTRPL

SEQ ID NO: 954 - protein, 736 aa, Artificial Sequence
  Description of Artificial Sequence: Synthetic polypeptide
MAADGYLPDWLEDNLSEGIREWWDLKPGAPKPKANQQKQDDGRGLVLPGYKYLGPFNGLDKGEPVNAADAAALEHDKAYDQQLKAGDNPYLRYNHADAEFQERLQEDTSFGGNLGRAVFQAKKRVLEPFGLVEEGAKTAPGKKRPVEQSPQEPDSSSGIGKTGQQPAKKRLNFGQTGDSESVPDPQPLGEPPATPAAVGPTTMASGGGAPMADNNEGADGVGNASGNWHCDSTWLGDRVITTSTRTWALPTYNNHLYKQISSASTGASNDNHYFGYSTPWGYFDFNRFHCHFSPRDWQRLINNNWGFRPKRLNFKLFNIQVKEVTTNDGVTTIANNLTSTVQVFSDSEYQLPYVLGSAHQGCLPPFPADVFMIPQYGYLTLNNGSQAVGRSSFYCLEYFPSQMLRTGNNFTFSYTFEDVPFHSSYAHSQSLDRLMNPLIDQYLYYLNRTQNQSGSAQNKDLLFSRGSPAGMSVQLKNWLPGPCYRQQRVSKTKTDNNNSNFTWTGASKYNLNGRESIINPGTAMASHKDDEDKFFPMSGVMIFGKESAGASNTALDNVMITDEEEIKATNPVATERFGTVAVNFQSSSTDPATGDVHVMGALPGMVWQDRDVYLQGPIWAKIPHTDGHFHPSPLMGGFGLKHPPPQILIKNTPVPANPPAEFSATKFASFITQYSTGQVSVEIEWELQKENSKRWNPEVQYTSNYAKSANVDFTVDNNGLYTEPRPIGTRYLTRPL

SEQ ID NO: 955 - protein, 736 aa, Artificial Sequence
  Description of Artificial Sequence: Synthetic polypeptide
MAADGYLPDWLEDNLSEGIREWWDLKPGAPKPKANQQKQDDGRGLVLPGYKYLGPFNGLDKGEPVNAADAAALEHDKAYDQQLKAGDNPYLRYNHADAEFQERLQEDTSFGGNLGRAVFQAKKRVLEPFGLVEEGAKTAPGKKRPVEQSPQEPDSSSGIGKSGQQPAKKRLNFGQTGDSESVPDPQPLGEPPATPAAVGPTTMASGGGAPMADNNEGADGVGNASGNWHCDSTWLGDRVITTSTRTWALPTYNNHLYKQISSASTGASNDNHYFGYSTPWGYFDFNRFHCHFSPRDWQRLINNNWGFRPKRLNFKLFNIQVKEVTTNDGVTTIANNLTSTVQVFSDSEYQLPYVLGSAHQGCLPPFPADVFMIPQYGYLTLNNGSQAVGRSSFYCLEYFPSQMLRTGNNFTFSYTFEDVPFHSSYAHSQSLDRLMNPLIDQYLYYLNRTQNQSGSAQNKDLLFSRGSPAGMSVQPKNWLPGPCYRQQRVSKTKTDNNNSNFTWTGASKYNLNGRESIINPGTAMASHKDDEDKFFPMSGVMIFGKGSAGASNTALDNVMITDEEEIKATNPVATERFGTVAVNFQSSSTDPATGDVHVMGALPGMVWQDRDVYLQGPIWAKIPHTDGHFHPSPLMGGFGLKHPPPQILIKNTPVPANPPAEFSATKFASFITQYSTGQVSVEIEWELQKENSKRWNPEVQYTSNYAKSANVDFTVDNNGLYTEPRPIGTRYLTRPL

SEQ ID NO: 956 - protein, 736 aa, Artificial Sequence; identical to SEQ ID NO: 697
  Description of Artificial Sequence: Synthetic polypeptide

SEQ ID NO: 957 - protein, 742 aa, Artificial Sequence
  Description of Artificial Sequence: Synthetic polypeptide
MAADGYLPDWLEDNLSEGIREWWALKPGAPQPKANQQHQDNGRGLVLPGYKYLGPFNGLDKGEPVNEADAAALEHDKAYDKQLEQGDNPYLKYNHADAEFQQRLATDTSFGGNLGRAVFQAKKRILEPLGLVEEGVKTAPGKKRPLEKTPNRPTNPDSGKAPAKKKQKDGEPADSARRTLDFEDSGAGDGPPEGSSSGEMSHDAEMRAAPGGNAVEAGQGADGVGNASGDWHCDSTWSEGRVTTTSTRTWVLPTYNNHLYLRIGTTANSNTYNGFSTPWGYFDFNRFHCHFSPRDWQRLINNNWGLRPKSMRVKIFNIQVKEVTTSNGETTVANNLTSTVQIFADSTYELPYVMDAGQEGSFPPFPNDVFMVPQYGYCGVVTGKNQNQTDRNAFYCLEYFPSQMLRTGNNFEVSYQFEKVPFHSMYAHSQSLDRMMNPLLDQYLWHLQSTTTGNSLNQGTATTTYGKITTGDFAYYRKNWLPGACIKQQKFSKNANQNYKIPASGGDALLKYDTHTTLNGRWSNMAPGPPMATAGAGDSDFSNSQLIFAGPNPSGNTTTSSNNLLFTSEEEIATTNPRDTDMFGQIADNNQNATTAPHIANLDAMGIVPGMVWQNRDIYYQGPIWAKVPHTDGHFHPSPLMGGFGLKHPPPQIFIKNTPVPANPNTTFSAARINSFLTQYSTGQVAVQIDWEIQKEHSKRWNPEVQFTSNYGTQNSMLWAPDNAGNYHELRAIGSRFLTHHL

SEQ ID NO: 958 - DNA, 2211 bp, Artificial Sequence
  Description of Artificial Sequence: Synthetic polynucleotide
atggctgccgatggttatcttccagattggctcgaggacaacctctctgagggcattcgcgagtggtgggacttgaaacctggagccccgaagcccaaagccaaccagcaaaagcaggacgacggccggggtctggtgcttcctggctacaagtacctcggacccttcaacggactcgacaagggggagcccgtcaacgcggcggacgcagcggccctcgagcacgacaaggcctacgaccagcagctcaaagcgggtgacaatccgtacctgcggtataaccacgccgacgccgagtttcaggagcgtctgcaagaagatacgtcttttgggggcaacctcgggcgagcagtcttccaggccaagaagcgggttctcgaacctctcggtctggttgaggaaggcgctaaggcggctcctggaaagaaacgtccggtagagcagtcgccacaagagccagactcctcctcgggcatcggcaagacaggccagcagcccgctaaaaagagactcaattttggtcagactggcgactcagagtcagtccccgatccacaacctctcggagaacctccagcagccccctcaggtctgggacctaatacaatggcttcaggcggtggcgctccaatggcagacaataacgaaggcgccgacggagtgggtaattcctcgggaaattggcattgcgattccacatggctgggggacagagtcatcaccaccagcacccgaacctgggccctgcccacctacaacaaccacctctacaagcaaatctccaacggcacctcgggaggaagcaccaacgacaacacctattttggctacagcaccccctgggggtattttgacttcaacagattccactgtcacttttcaccacgtgactggcaacgactcatcaacaacaattggggattccggcccaaaagactcaacttcaagctgttcaacatccaggtcaaggaagtcacgacgaacgaaggcaccaagaccatcgccaataatctcaccagcaccgtgcaggtctttacggactcggagtaccagttaccgtacgtgctaggatccgctcaccagggatgtctgcctccgttcccggcggacgtcttcatggttcctcagtacggctatttaactttaaacaatggaagccaagccctgggacgttcctccttctactgtctggagtatttcccatcgcagatgctgagaaccggcaacaactttcagttcagctacaccttcgaggacgtgcctttccacagcagctacgcgcacagccagagcctggacaggctgatgaatcccctcatcgaccagtacctgtactacctggtcagaacgcaaacgactggaactggagggacgcagactctggcattcagccaagcgggtcctagctcaatggccaaccaggctagaaattgggtgcccggaccttgctaccggcagcagcgcgtctccacgacaaccaaccagaacaacaacagcaactttgcctggacgggagctgccaagtttaagctgaacggccgagactctctaatgaatccgggcgtggcaatggcttcccacaaggatgacgacgaccgcttcttcccttcgagcggggtcctgatttttggcaagcaaggagccgggaacgatggagtggattacagccaagtgctgattacagatgaggaagaaatcaaggctaccaaccccgtggccacagaagaatatggagcagtggccatcaacaaccaggccgccaatacgcaggcgcagaccggactcgtgcacaaccagggggtgattcccggcatggtgtggcagaatagagacgtgtacctgcagggtcccatctgggccaaaattcctcacacggacggcaactttcacccgtctcccctgatgggcggctttggactgaagcacccgcctcctcaaattctcatcaagaacacaccggttccagcggacccgccgcttaccttcaaccaggccaagctgaactctttcatcacgcagtacagcaccggacaggtcagcgtggaaatcgagtgggagctgcagaaagaaaacagcaaacgctggaatccagagattcaatacacttccaactactacaaatctacaaatgtggactttgctgtcaacacggagggggtttatagcgagcctcgccccattggcacccgttacctcacccgcaacctgtaa

SEQ ID NO: 959 - DNA, 2592 bp, Artificial Sequence
  Description of Artificial Sequence: Synthetic polynucleotide
ctggctgccgatggttatcttccagattggctcgaggacaacctctctgagggcattcgcgagtggtgggacttgaaacctggagccccgaagcccaaagccaaccagcaaaagcaggacgacggccggggtctggtgcttcctggctacaagtacctcggacccttcaacggactcgacaagggggagcccgtcaacgcggcggacgcagcggccctcgagcacgacaaggcctacgaccagcagctcaaagcgggtgacaatccgtacctgcggtataaccacgccgacgccgagtttcaggagcgtctgcaagaagatacgtcttttgggggcaacctcgggcgagcagtcttccaggccaagaagcgggttctcgaacctctcggtctggttgaggaaggcgctaagatggaagtgcagctccaagccagtggtggcggactggtgcaggcaggaggcagcttgaggctcagctgtgccgccagcggcttcaagatcacccactacaccatgggctggttccggcaggcccctggcaaggagagggagttcgtgagcaggattacctggggtggtgacaacaccttctacagcaacagcgtgaagggcaggttcaccatcagcagggacaacgccaagaacaccgtgtacctgcagatgaacagcctgaagcccgaggacaccgccgactactactgtgcagccggcagtaccagcaccgctacccccctgagggtggactactggggcaaaggcactcaggtgacagtgtcttcaggagggggtggcagcgctcctggaaagaaacgtccggtagagcagtcgccacaagagccagactcctcctcgggcatcggcaagacaggccagcagcccgctaaaaagagactcaattttggtcagactggcgactcagagtcagtccccgatccacaacctctcggagaacctccagcagccccctcaggtctgggacctaatacaatggcttcaggcggtggcgctccaatggcagacaataacgaaggcgccgacggagtgggtaattcctcgggaaattggcattgcgattccacatggctgggggacagagtcatcaccaccagcacccgaacctgggccctgcccacctacaacaaccacctctacaagcaaatctccaacggcacctcgggaggaagcaccaacgacaacacctattttggctacagcaccccctgggggtattttgacttcaacagattccactgtcacttttcaccacgtgactggcaacgactcatcaacaacaattggggattccggcccaaaagactcaacttcaagctgttcaacatccaggtcaaggaagtcacgacgaacgaaggcaccaagaccatcgccaataatctcaccagcaccgtgcaggtctttacggactcggagtaccagttaccgtacgtgctaggatccgctcaccagggatgtctgcctccgttcccggcggacgtcttcatggttcctcagtacggctatttaactttaaacaatggaagccaagccctgggacgttcctccttctactgtctggagtatttcccatcgcagatgctgagaaccggcaacaactttcagttcagctacaccttcgaggacgtgcctttccacagcagctacgcgcacagccagagcctggacaggctgatgaatcccctcatcgaccagtacctgtactacctggtcagaacgcaaacgactggaactggagggacgcagactctggcattcagccaagcgggtcctagctcaatggccaaccaggctagaaattgggtgcccggaccttgctaccggcagcagcgcgtctccacgacaaccaaccagaacaacaacagcaactttgcctggacgggagctgccaagtttaagctgaacggccgagactctctaatgaatccgggcgtggcaatggcttcccacaaggatgacgacgaccgcttcttcccttcgagcggggtcctgatttttggcaagcaaggagccgggaacgatggagtggattacagccaagtgctgattacagatgaggaagaaatcaaggctaccaaccccgtggccacagaagaatatggagcagtggccatcaacaaccaggccgccaatacgcaggcgcagaccggactcgtgcacaaccagggggtgattcccggcatggtgtggcagaatagagacgtgtacctgcagggtcccatctgggccaaaattcctcacacggacggcaactttcacccgtctcccctgatgggcggctttggactgaagcacccgcctcctcaaattctcatcaagaacacaccggttccagcggacccgccgcttaccttcaaccaggccaagctgaactctttcatcacgcagtacagcaccggacaggtcagcgtggaaatcgagtgggagctgcagaaagaaaacagcaaacgctggaatccagagattcaatacacttccaactactacaaatctacaaatgtggactttgctgtcaacacggagggggtttatagcgagcctcgccccattggcacccgttacctcacccgcaacctgtaa

SEQ ID NO: 960 - DNA, 2601 bp, Artificial Sequence
  Description of Artificial Sequence: Synthetic polynucleotide
ctggctgccgatggttatcttccagattggctcgaggacaacctctctgagggcattcgcgagtggtgggacttgaaacctggagccccgaagcccaaagccaaccagcaaaagcaggacgacggccggggtctggtgcttcctggctacaagtacctcggacccttcaacggactcgacaagggggagcccgtcaacgcggcggacgcagcggccctcgagcacgacaaggcctacgaccagcagctcaaagcgggtgacaatccgtacctgcggtataaccacgccgacgccgagtttcaggagcgtctgcaagaagatacgtcttttgggggcaacctcgggcgagcagtcttccaggccaagaagcgggttctcgaacctctcggtctggttgaggaaggcgctaagatggaggtgcagctgcaggcttctggaggaggactggtgcaggctggagggagtctgaggctgtcttgcagtgcctcagtgaggactttctccatctacgccatgggctggtttaggcaggctcccgggaaggagcgcgaattcgtggccggaatcaaccggtctggcgacgtgaccaagtacgctgatttcgtgaaaggccggtttagcatttccagagacaacgccaagaatatggtgtatctgcagatgaactccctgaaacctgaagacacagctctgtactattgtgccgctacttgggcctacgataccgtgggggctctgacatcaggatataatttttggggccaggggacccaggtgacagtgagctccggaggaggaggaagcgctcctggaaagaaacgtccggtagagcagtcgccacaagagccagactcctcctcgggcatcggcaagacaggccagcagcccgctaaaaagagactcaattttggtcagactggcgactcagagtcagtccccgatccacaacctctcggagaacctccagcagccccctcaggtctgggacctaatacaatggcttcaggcggtggcgctccaatggcagacaataacgaaggcgccgacggagtgggtaattcctcgggaaattggcattgcgattccacatggctgggggacagagtcatcaccaccagcacccgaacctgggccctgcccacctacaacaaccacctctacaagcaaatctccaacggcacctcgggaggaagcaccaacgacaacacctattttggctacagcaccccctgggggtattttgacttcaacagattccactgtcacttttcaccacgtgactggcaacgactcatcaacaacaattggggattccggcccaaaagactcaacttcaagctgttcaacatccaggtcaaggaagtcacgacgaacgaaggcaccaagaccatcgccaataatctcaccagcaccgtgcaggtctttacggactcggagtaccagttaccgtacgtgctaggatccgctcaccagggatgtctgcctccgttcccggcggacgtcttcatggttcctcagtacggctatttaactttaaacaatggaagccaagccctgggacgttcctccttctactgtctggagtatttcccatcgcagatgctgagaaccggcaacaactttcagttcagctacaccttcgaggacgtgcctttccacagcagctacgcgcacagccagagcctggacaggctgatgaatcccctcatcgaccagtacctgtactacctggtcagaacgcaaacgactggaactggagggacgcagactctggcattcagccaagcgggtcctagctcaatggccaaccaggctagaaattgggtgcccggaccttgctaccggcagcagcgcgtctccacgacaaccaaccagaacaacaacagcaactttgcctggacgggagctgccaagtttaagctgaacggccgagactctctaatgaatccgggcgtggcaatggcttcccacaaggatgacgacgaccgcttcttcccttcgagcggggtcctgatttttggcaagcaaggagccgggaacgatggagtggattacagccaagtgctgattacagatgaggaagaaatcaaggctaccaaccccgtggccacagaagaatatggagcagtggccatcaacaaccaggccgccaatacgcaggcgcagaccggactcgtgcacaaccagggggtgattcccggcatggtgtggcagaatagagacgtgtacctgcagggtcccatctgggccaaaattcctcacacggacggcaactttcacccgtctcccctgatgggcggctttggactgaagcacccgcctcctcaaattctcatcaagaacacaccggttccagcggacccgccgcttaccttcaaccaggccaagctgaactctttcatcacgcagtacagcaccggacaggtcagcgtggaaatcgagtgggagctgcagaaagaaaacagcaaacgctggaatccagagattcaatacacttccaactactacaaatctacaaatgtggactttgctgtcaacacggagggggtttatagcgagcctcgccccattggcacccgttacctcacccgcaacctgtaa

SEQ ID NO: 961 - DNA, 2367 bp, Artificial Sequence
  Description of Artificial Sequence: Synthetic polynucleotide
ctggctgccgatggttatcttccagattggctcgaggacaacctctctgagggcattcgcgagtggtgggacttgaaacctggagccccgaagcccaaagccaaccagcaaaagcaggacgacggccggggtctggtgcttcctggctacaagtacctcggacccttcaacggactcgacaagggggagcccgtcaacgcggcggacgcagcggccctcgagcacgacaaggcctacgaccagcagctcaaagcgggtgacaatccgtacctgcggtataaccacgccgacgccgagtttcaggagcgtctgcaagaagatacgtcttttgggggcaacctcgggcgagcagtcttccaggccaagaagcgggttctcgaacctctcggtctggttgaggaaggcgctaagatgccaagcagtgtaatcgatgcgctgcagtacaagctggagggcaccacgaggctgaccaggaagaggggtctgaagctggccacggccctcagccttagcaataagttcgtagagggcagccccagcggcggcggcggcagcggcggcggcggcagcgctcctggaaagaaacgtccggtagagcagtcgccacaagagccagactcctcctcgggcatcggcaagacaggccagcagcccgctaaaaagagactcaattttggtcagactggcgactcagagtcagtccccgatccacaacctctcggagaacctccagcagccccctcaggtctgggacctaatacaatggcttcaggcggtggcgctccaatggcagacaataacgaaggcgccgacggagtgggtaattcctcgggaaattggcattgcgattccacatggctgggggacagagtcatcaccaccagcacccgaacctgggccctgcccacctacaacaaccacctctacaagcaaatctccaacggcacctcgggaggaagcaccaacgacaacacctattttggctacagcaccccctgggggtattttgacttcaacagattccactgtcacttttcaccacgtgactggcaacgactcatcaacaacaattggggattccggcccaaaagactcaacttcaagctgttcaacatccaggtcaaggaagtcacgacgaacgaaggcaccaagaccatcgccaataatctcaccagcaccgtgcaggtctttacggactcggagtaccagttaccgtacgtgctaggatccgctcaccagggatgtctgcctccgttcccggcggacgtcttcatggttcctcagtacggctatttaactttaaacaatggaagccaagccctgggacgttcctccttctactgtctggagtatttcccatcgcagatgctgagaaccggcaacaactttcagttcagctacaccttcgaggacgtgcctttccacagcagctacgcgcacagccagagcctggacaggctgatgaatcccctcatcgaccagtacctgtactacctggtcagaacgcaaacgactggaactggagggacgcagactctggcattcagccaagcgggtcctagctcaatggccaaccaggctagaaattgggtgcccggaccttgctaccggcagcagcgcgtctccacgacaaccaaccagaacaacaacagcaactttgcctggacgggagctgccaagtttaagctgaacggccgagactctctaatgaatccgggcgtggcaatggcttcccacaaggatgacgacgaccgcttcttcccttcgagcggggtcctgatttttggcaagcaaggagccgggaacgatggagtggattacagccaagtgctgattacagatgaggaagaaatcaaggctaccaaccccgtggccacagaagaatatggagcagtggccatcaacaaccaggccgccaatacgcaggcgcagaccggactcgtgcacaaccagggggtgattcccggcatggtgtggcagaatagagacgtgtacctgcagggtcccatctgggccaaaattcctcacacggacggcaactttcacccgtctcccctgatgggcggctttggactgaagcacccgcctcctcaaattctcatcaagaacacaccggttccagcggacccgccgcttaccttcaaccaggccaagctgaactctttcatcacgcagtacagcaccggacaggtcagcgtggaaatcgagtgggagctgcagaaagaaaacagcaaacgctggaatccagagattcaatacacttccaactactacaaatctacaaatgtggactttgctgtcaacacggagggggtttatagcgagcctcgccccattggcacccgttacctcacccgcaacctgtaa

SEQ ID NO: 962 - DNA, 2328 bp, Artificial Sequence
  Description of Artificial Sequence: Synthetic polynucleotide
ctggctgccgatggttatcttccagattggctcgaggacaacctctctgagggcattcgcgagtggtgggacttgaaacctggagccccgaagcccaaagccaaccagcaaaagcaggacgacggccggggtctggtgcttcctggctacaagtacctcggacccttcaacggactcgacaagggggagcccgtcaacgcggcggacgcagcggccctcgagcacgacaaggcctacgaccagcagctcaaagcgggtgacaatccgtacctgcggtataaccacgccgacgccgagtttcaggagcgtctgcaagaagatacgtcttttgggggcaacctcgggcgagcagtcttccaggccaagaagcgggttctcgaacctctcggtctggttgaggaaggcgctaagatgtataccatctggatgcccgagaaccccaggcccggtaccccctgcgacatcttcaccaacagcaggggcaagcgagccagcaacggcggcggcggcggcagcggcggcggcggcagcgctcctggaaagaaacgtccggtagagcagtcgccacaagagccagactcctcctcgggcatcggcaagacaggccagcagcccgctaaaaagagactcaattttggtcagactggcgactcagagtcagtccccgatccacaacctctcggagaacctccagcagccccctcaggtctgggacctaatacaatggcttcaggcggtggcgctccaatggcagacaataacgaaggcgccgacggagtgggtaattcctcgggaaattggcattgcgattccacatggctgggggacagagtcatcaccaccagcacccgaacctgggccctgcccacctacaacaaccacctctacaagcaaatctccaacggcacctcgggaggaagcaccaacgacaacacctattttggctacagcaccccctgggggtattttgacttcaacagattccactgtcacttttcaccacgtgactggcaacgactcatcaacaacaattggggattccggcccaaaagactcaacttcaagctgttcaacatccaggtcaaggaagtcacgacgaacgaaggcaccaagaccatcgccaataatctcaccagcaccgtgcaggtctttacggactcggagtaccagttaccgtacgtgctaggatccgctcaccagggatgtctgcctccgttcccggcggacgtcttcatggttcctcagtacggctatttaactttaaacaatggaagccaagccctgggacgttcctccttctactgtctggagtatttcccatcgcagatgctgagaaccggcaacaactttcagttcagctacaccttcgaggacgtgcctttccacagcagctacgcgcacagccagagcctggacaggctgatgaatcccctcatcgaccagtacctgtactacctggtcagaacgcaaacgactggaactggagggacgcagactctggcattcagccaagcgggtcctagctcaatggccaaccaggctagaaattgggtgcccggaccttgctaccggcagcagcgcgtctccacgacaaccaaccagaacaacaacagcaactttgcctggacgggagctgccaagtttaagctgaacggccgagactctctaatgaatccgggcgtggcaatggcttcccacaaggatgacgacgaccgcttcttcccttcgagcggggtcctgatttttggcaagcaaggagccgggaacgatggagtggattacagccaagtgctgattacagatgaggaagaaatcaaggctaccaaccccgtggccacagaagaatatggagcagtggccatcaacaaccaggccgccaatacgcaggcgcagaccggactcgtgcacaaccagggggtgattcccggcatggtgtggcagaatagagacgtgtacctgcagggtcccatctgggccaaaattcctcacacggacggcaactttcacccgtctcccctgatgggcggctttggactgaagcacccgcctcctcaaattctcatcaagaacacaccggttccagcggacccgccgcttaccttcaaccaggccaagctgaactctttcatcacgcagtacagcaccggacaggtcagcgtggaaatcgagtgggagctgcagaaagaaaacagcaaacgctggaatccagagattcaatacacttccaactactacaaatctacaaatgtggactttgctgtcaacacggagggggtttatagcgagcctcgccccattggcacccgttacctcacccgcaacctgtaa

SEQ ID NO: 963 - DNA, 2298 bp, Artificial Sequence
  Description of Artificial Sequence: Synthetic polynucleotide
ctggctgccgatggttatcttccagattggctcgaggacaacctctctgagggcattcgcgagtggtgggacttgaaacctggagccccgaagcccaaagccaaccagcaaaagcaggacgacggccggggtctggtgcttcctggctacaagtacctcggacccttcaacggactcgacaagggggagcccgtcaacgcggcggacgcagcggccctcgagcacgacaaggcctacgaccagcagctcaaagcgggtgacaatccgtacctgcggtataaccacgccgacgccgagtttcaggagcgtctgcaagaagatacgtcttttgggggcaacctcgggcgagcagtcttccaggccaagaagcgggttctcgaacctctcggtctggttgaggaaggcgctaagatgaccttcttctacggcggcagcaggggcaagaggaacaacttcaagaccgaggagtacggcggcggcggcagcggcggcggcggcagcgctcctggaaagaaacgtccggtagagcagtcgccacaagagccagactcctcctcgggcatcggcaagacaggccagcagcccgctaaaaagagactcaattttggtcagactggcgactcagagtcagtccccgatccacaacctctcggagaacctccagcagccccctcaggtctgggacctaatacaatggcttcaggcggtggcgctccaatggcagacaataacgaaggcgccgacggagtgggtaattcctcgggaaattggcattgcgattccacatggctgggggacagagtcatcaccaccagcacccgaacctgggccctgcccacctacaacaaccacctctacaagcaaatctccaacggcacctcgggaggaagcaccaacgacaacacctattttggctacagcaccccctgggggtattttgacttcaacagattccactgtcacttttcaccacgtgactggcaacgactcatcaacaacaattggggattccggcccaaaagactcaacttcaagctgttcaacatccaggtcaaggaagtcacgacgaacgaaggcaccaagaccatcgccaataatctcaccagcaccgtgcaggtctttacggactcggagtaccagttaccgtacgtgctaggatccgctcaccagggatgtctgcctccgttcccggcggacgtcttcatggttcctcagtacggctatttaactttaaacaatggaagccaagccctgggacgttcctccttctactgtctggagtatttcccatcgcagatgctgagaaccggcaacaactttcagttcagctacaccttcgaggacgtgcctttccacagcagctacgcgcacagccagagcctggacaggctgatgaatcccctcatcgaccagtacctgtactacctggtcagaacgcaaacgactggaactggagggacgcagactctggcattcagccaagcgggtcctagctcaatggccaaccaggctagaaattgggtgcccggaccttgctaccggcagcagcgcgtctccacgacaaccaaccagaacaacaacagcaactttgcctggacgggagctgccaagtttaagctgaacggccgagactctctaatgaatccgggcgtggcaatggcttcccacaaggatgacgacgaccgcttcttcccttcgagcggggtcctgatttttggcaagcaaggagccgggaacgatggagtggattacagccaagtgctgattacagatgaggaagaaatcaaggctaccaaccccgtggccacagaagaatatggagcagtggccatcaacaaccaggccgccaatacgcaggcgcagaccggactcgtgcacaaccagggggtgattcccggcatggtgtggcagaatagagacgtgtacctgcagggtcccatctgggccaaaattcctcacacggacggcaactttcacccgtctcccctgatgggcggctttggactgaagcacccgcctcctcaaattctcatcaagaacacaccggttccagcggacccgccgcttaccttcaaccaggccaagctgaactctttcatcacgcagtacagcaccggacaggtcagcgtggaaatcgagtgggagctgcagaaagaaaacagcaaacgctggaatccagagattcaatacacttccaactactacaaatctacaaatgtggactttgctgtcaacacggagggggtttatagcgagcctcgccccattggcacccgttacctcacccgcaacctgtaa

SEQ ID NO: 964 - DNA, 2211 bp, Artificial Sequence
  Description of Artificial Sequence: Synthetic polynucleotide
atggctgccgatggttatcttccagattggctcgaggacaaccttagtgaaggaattcgcgagtggtgggctttgaaacctggagcccctcaacccaaggcaaatcaacaacatcaagacaacgctcgaggtcttgtgcttccgggttacaaataccttggacccggcaacggactcgacaagggggagccggtcaacgcagcagacgcggcggccctcgagcacgacaaggcctacgaccagcagctcaaggccggagacaacccgtacctcaagtacaaccacgccgacgccgagttccaggagcggctcaaagaagatacgtcttttgggggcaacctcgggcgagcagtcttccaggccaaaaagaggcttcttgaacctcttggtctggttgaggaagcggctaaggcggctcctggaaagaagaggcctgtagagcagtctcctcaggaaccggactcctccgcgggtattggcaaatcgggtgcacagcccgctaaaaagagactcaatttcggtcagactggcgacacagagtcagtcccagaccctcaaccaatcggagaacctcccgcagccccctcaggtgtgggatctcttacaatggcttcaggtggtggcgcaccagtggcagacaataacgaaggtgccgatggagtgggtagttcctcgggaaattggcattgcgattcccaatggctgggggacagagtcatcaccaccagcacccgaacctgggccctgcccacctacaacaatcacctctacaagcaaatctccaacagcacatctggaggatcttcaaatgacaacgcctacttcggctacagcaccccctgggggtattttgacttcaacagattccactgccacttctcaccacgtgactggcagcgactcatcaacaacaactggggattccggcctaagcgactcaacttcaagctcttcaacattcaggtcaaagaggttacggacaacaatggagtcaagaccatcgccaataaccttaccagcacggtccaggtcttcacggactcagactatcagctcccgtacgtgctcgggtcggctcacgagggctgcctcccgccgttcccagcggacgttttcatgattcctcagtacgggtatctgacgcttaatgatggaagccaggccgtgggtcgttcgtccttttactgcctggaatatttcccgtcgcaaatgctaagaacgggtaacaacttccagttcaactacgagtttgagaacgtacctttccatagcagctacgctcacagccaaagcctggaccgactaatgaatccactcatcgaccaatacttgtactatctctcaaagactattaacgattctggacagaatcaacaaacgctaaaattcagtgtggccggacccagcaacatggctgtccagggaagaaactacatacctggacccagctaccgacaacaacgtgtctcaaccactgtgactcaaaacaacaacagcgaatttgcttggcctggagcttcttcttgggctctcaatggacgtaatagcttgatgaatcctggacctgctatggccagccacaaagaaggagaggaccgtttctttcctttgtctggatctttaatttttggcaaacaaggaactggaagagacaacgtggatgcggacgaagtcatgataaccaacgaagaagaaattaaaactactaacccggtagcaacggagtcctatggacaagtggccataaaccaccagagtgcccaagcacaggcgcagaccggctgggttcaaaaccaaggaatacttccgggtatggtttggcaggacagagatgtgtacctgcaaggacccatttgggccaaaattcctcacacggacggcaactttcacccttctccgctgatgggagggtttggaatgaagcacccgcctcctcagatcctcatcaaaaacacacctgtacctgcggatcctccaacggccttcaacaaggacaagctgaactctttcatcacccagtattctactggccaagtcagcgtggagatcgagtgggagctgcagaaggaaaacagcaagcgctggaacccggagatccagtacacttccaactattacaagtctaataatgttgaatttgctgttaatactgaaggtgtatatagtgaaccccgccccattggcaccagatacctgactcgtaatctgtaa

SEQ ID NO: 965 - DNA, 2277 bp, Artificial Sequence
  Description of Artificial Sequence: Synthetic polynucleotide
ctggctgccgatggttatcttccagattggctcgaggacaaccttagtgaaggaattcgcgagtggtgggctttgaaacctggagcccctcaacccaaggcaaatcaacaacatcaagacaacgctcgaggtcttgtgcttccgggttacaaataccttggacccggcaacggactcgacaagggggagccggtcaacgcagcagacgcggcggccctcgagcacgacaaggcctacgaccagcagctcaaggccggagacaacccgtacctcaagtacaaccacgccgacgccgagttccaggagcggctcaaagaagatacgtcttttgggggcaacctcgggcgagcagtcttccaggccaaaaagaggcttcttgaacctcttggtctggttgaggaagcggctaagatgaacaaccagaagatcgtgaacctgaaggagaaggtggcccagctggaggccggcggcggcggcagcgctcctggaaagaagaggcctgtagagcagtctcctcaggaaccggactcctccgcgggtattggcaaatcgggtgcacagcccgctaaaaagagactcaatttcggtcagactggcgacacagagtcagtcccagaccctcaaccaatcggagaacctcccgcagccccctcaggtgtgggatctcttacaatggcttcaggtggtggcgcaccagtggcagacaataacgaaggtgccgatggagtgggtagttcctcgggaaattggcattgcgattcccaatggctgggggacagagtcatcaccaccagcacccgaacctgggccctgcccacctacaacaatcacctctacaagcaaatctccaacagcacatctggaggatcttcaaatgacaacgcctacttcggctacagcaccccctgggggtattttgacttcaacagattccactgccacttctcaccacgtgactggcagcgactcatcaacaacaactggggattccggcctaagcgactcaacttcaagctcttcaacattcaggtcaaagaggttacggacaacaatggagtcaagaccatcgccaataaccttaccagcacggtccaggtcttcacggactcagactatcagctcccgtacgtgctcgggtcggctcacgagggctgcctcccgccgttcccagcggacgttttcatgattcctcagtacgggtatctgacgcttaatgatggaagccaggccgtgggtcgttcgtccttttactgcctggaatatttcccgtcgcaaatgctaagaacgggtaacaacttccagttcaactacgagtttgagaacgtacctttccatagcagctacgctcacagccaaagcctggaccgactaatgaatccactcatcgaccaatacttgtactatctctcaaagactattaacgattctggacagaatcaacaaacgctaaaattcagtgtggccggacccagcaacatggctgtccagggaagaaactacatacctggacccagctaccgacaacaacgtgtctcaaccactgtgactcaaaacaacaacagcgaatttgcttggcctggagcttcttcttgggctctcaatggacgtaatagcttgatgaatcctggacctgctatggccagccacaaagaaggagaggaccgtttctttcctttgtctggatctttaatttttggcaaacaaggaactggaagagacaacgtggatgcggacgaagtcatgataaccaacgaagaagaaattaaaactactaacccggtagcaacggagtcctatggacaagtggccataaaccaccagagtgcccaagcacaggcgcagaccggctgggttcaaaaccaaggaatacttccgggtatggtttggcaggacagagatgtgtacctgcaaggacccatttgggccaaaattcctcacacggacggcaactttcacccttctccgctgatgggagggtttggaatgaagcacccgcctcctcagatcctcatcaaaaacacacctgtacctgcggatcctccaacggccttcaacaaggacaagctgaactctttcatcacccagtattctactggccaagtcagcgtggagatcgagtgggagctgcagaaggaaaacagcaagcgctggaacccggagatccagtacacttccaactattacaagtctaataatgttgaatttgctgttaatactgaaggtgtatatagtgaaccccgccccattggcaccagatacctgactcgtaatctgtaa

SEQ ID NO: 966 - DNA, 2313 bp, Artificial Sequence
  Description of Artificial Sequence: Synthetic polynucleotide
ctggctgccgatggttatcttccagattggctcgaggacaaccttagtgaaggaattcgcgagtggtgggctttgaaacctggagcccctcaacccaaggcaaatcaacaacatcaagacaacgctcgaggtcttgtgcttccgggttacaaataccttggacccggcaacggactcgacaagggggagccggtcaacgcagcagacgcggcggccctcgagcacgacaaggcctacgaccagcagctcaaggccggagacaacccgtacctcaagtacaaccacgccgacgccgagttccaggagcggctcaaagaagatacgtcttttgggggcaacctcgggcgagcagtcttccaggccaaaaagaggcttcttgaacctcttggtctggttgaggaagcggctaagatgtataccatctggatgcccgagaaccccaggcccggtaccccctgcgacatcttcaccaacagcaggggcaagcgagccagcaacggcggcggcggcggcagcgctcctggaaagaagaggcctgtagagcagtctcctcaggaaccggactcctccgcgggtattggcaaatcgggtgcacagcccgctaaaaagagactcaatttcggtcagactggcgacacagagtcagtcccagaccctcaaccaatcggagaacctcccgcagccccctcaggtgtgggatctcttacaatggcttcaggtggtggcgcaccagtggcagacaataacgaaggtgccgatggagtgggtagttcctcgggaaattggcattgcgattcccaatggctgggggacagagtcatcaccaccagcacccgaacctgggccctgcccacctacaacaatcacctctacaagcaaatctccaacagcacatctggaggatcttcaaatgacaacgcctacttcggctacagcaccccctgggggtattttgacttcaacagattccactgccacttctcaccacgtgactggcagcgactcatcaacaacaactggggattccggcctaagcgactcaacttcaagctcttcaacattcaggtcaaagaggttacggacaacaatggagtcaagaccatcgccaataaccttaccagcacggtccaggtcttcacggactcagactatcagctcccgtacgtgctcgggtcggctcacgagggctgcctcccgccgttcccagcggacgttttcatgattcctcagtacgggtatctgacgcttaatgatggaagccaggccgtgggtcgttcgtccttttactgcctggaatatttcccgtcgcaaatgctaagaacgggtaacaacttccagttcaactacgagtttgagaacgtacctttccatagcagctacgctcacagccaaagcctggaccgactaatgaatccactcatcgaccaatacttgtactatctctcaaagactattaacgattctggacagaatcaacaaacgctaaaattcagtgtggccggacccagcaacatggctgtccagggaagaaactacatacctggacccagctaccgacaacaacgtgtctcaaccactgtgactcaaaacaacaacagcgaatttgcttggcctggagcttcttcttgggctctcaatggacgtaatagcttgatgaatcctggacctgctatggccagccacaaagaaggagaggaccgtttctttcctttgtctggatctttaatttttggcaaacaaggaactggaagagacaacgtggatgcggacgaagtcatgataaccaacgaagaagaaattaaaactactaacccggtagcaacggagtcctatggacaagtggccataaaccaccagagtgcccaagcacaggcgcagaccggctgggttcaaaaccaaggaatacttccgggtatggtttggcaggacagagatgtgtacctgcaaggacccatttgggccaaaattcctcacacggacggcaactttcacccttctccgctgatgggagggtttggaatgaagcacccgcctcctcagatcctcatcaaaaacacacctgtacctgcggatcctccaacggccttcaacaaggacaagctgaactctttcatcacccagtattctactggccaagtcagcgtggagatcgagtgggagctgcagaaggaaaacagcaagcgctggaacccggagatccagtacacttccaactattacaagtctaataatgttgaatttgctgttaatactgaaggtgtatatagtgaaccccgccccattggcaccagatacctgactcgtaatctgtaa

SEQ ID NO: 967 - DNA, 2283 bp, Artificial Sequence
  Description of Artificial Sequence: Synthetic polynucleotide
ctggctgccgatggttatcttccagattggctcgaggacaaccttagtgaaggaattcgcgagtggtgggctttgaaacctggagcccctcaacccaaggcaaatcaacaacatcaagacaacgctcgaggtcttgtgcttccgggttacaaataccttggacccggcaacggactcgacaagggggagccggtcaacgcagcagacgcggcggccctcgagcacgacaaggcctacgaccagcagctcaaggccggagacaacccgtacctcaagtacaaccacgccgacgccgagttccaggagcggctcaaagaagatacgtcttttgggggcaacctcgggcgagcagtcttccaggccaaaaagaggcttcttgaacctcttggtctggttgaggaagcggctaagatgaccttcttctacggcggcagcaggggcaagaggaacaacttcaagaccgaggagtacggcggcggcggcagcgctcctggaaagaagaggcctgtagagcagtctcctcaggaaccggactcctccgcgggtattggcaaatcgggtgcacagcccgctaaaaagagactcaatttcggtcagactggcgacacagagtcagtcccagaccctcaaccaatcggagaacctcccgcagccccctcaggtgtgggatctcttacaatggcttcaggtggtggcgcaccagtggcagacaataacgaaggtgccgatggagtgggtagttcctcgggaaattggcattgcgattcccaatggctgggggacagagtcatcaccaccagcacccgaacctgggccctgcccacctacaacaatcacctctacaagcaaatctccaacagcacatctggaggatcttcaaatgacaacgcctacttcggctacagcaccccctgggggtattttgacttcaacagattccactgccacttctcaccacgtgactggcagcgactcatcaacaacaactggggattccggcctaagcgactcaacttcaagctcttcaacattcaggtcaaagaggttacggacaacaatggagtcaagaccatcgccaataaccttaccagcacggtccaggtcttcacggactcagactatcagctcccgtacgtgctcgggtcggctcacgagggctgcctcccgccgttcccagcggacgttttcatgattcctcagtacgggtatctgacgcttaatgatggaagccaggccgtgggtcgttcgtccttttactgcctggaatatttcccgtcgcaaatgctaagaacgggtaacaacttccagttcaactacgagtttgagaacgtacctttccatagcagctacgctcacagccaaagcctggaccgactaatgaatccactcatcgaccaatacttgtactatctctcaaagactattaacgattctggacagaatcaacaaacgctaaaattcagtgtggccggacccagcaacatggctgtccagggaagaaactacatacctggacccagctaccgacaacaacgtgtctcaaccactgtgactcaaaacaacaacagcgaatttgcttggcctggagcttcttcttgggctctcaatggacgtaatagcttgatgaatcctggacctgctatggccagccacaaagaaggagaggaccgtttctttcctttgtctggatctttaatttttggcaaacaaggaactggaagagacaacgtggatgcggacgaagtcatgataaccaacgaagaagaaattaaaactactaacccggtagcaacggagtcctatggacaagtggccataaaccaccagagtgcccaagcacaggcgcagaccggctgggttcaaaaccaaggaatacttccgggtatggtttggcaggacagagatgtgtacctgcaaggacccatttgggccaaaattcctcacacggacggcaactttcacccttctccgctgatgggagggtttggaatgaagcacccgcctcctcagatcctcatcaaaaacacacctgtacctgcggatcctccaacggccttcaacaaggacaagctgaactctttcatcacccagtattctactggccaagtcagcgtggagatcgagtgggagctgcagaaggaaaacagcaagcgctggaacccggagatccagtacacttccaactattacaagtctaataatgttgaatttgctgttaatactgaaggtgtatatagtgaaccccgccccattggcaccagatacctgactcgtaatctgtaa

SEQ ID NO: 968 - DNA, 2283 bp, Artificial Sequence
  Description of Artificial Sequence: Synthetic polynucleotide
ctggctgccgatggttatcttccagattggctcgaggacaaccttagtgaaggaattcgcgagtggtgggctttgaaacctggagcccctcaacccaaggcaaatcaacaacatcaagacaacgctcgaggtcttgtgcttccgggttacaaataccttggacccggcaacggactcgacaagggggagccggtcaacgcagcagacgcggcggccctcgagcacgacaaggcctacgaccagcagctcaaggccggagacaacccgtacctcaagtacaaccacgccgacgccgagttccaggagcggctcaaagaagatacgtcttttgggggcaacctcgggcgagcagtcttccaggccaaaaagaggcttcttgaacctcttggtctggttgaggaagcggctaagatggcagctgcggccgccgcggctgcagcggctgcagccgccgcagctgcggctgcagcgggcggcggcggcagcgctcctggaaagaagaggcctgtagagcagtctcctcaggaaccggactcctccgcgggtattggcaaatcgggtgcacagcccgctaaaaagagactcaatttcggtcagactggcgacacagagtcagtcccagaccctcaaccaatcggagaacctcccgcagccccctcaggtgtgggatctcttacaatggcttcaggtggtggcgcaccagtggcagacaataacgaaggtgccgatggagtgggtagttcctcgggaaattggcattgcgattcccaatggctgggggacagagtcatcaccaccagcacccgaacctgggccctgcccacctacaacaatcacctctacaagcaaatctccaacagcacatctggaggatcttcaaatgacaacgcctacttcggctacagcaccccctgggggtattttgacttcaacagattccactgccacttctcaccacgtgactggcagcgactcatcaacaacaactggggattccggcctaagcgactcaacttcaagctcttcaacattcaggtcaaagaggttacggacaacaatggagtcaagaccatcgccaataaccttaccagcacggtccaggtcttcacggactcagactatcagctcccgtacgtgctcgggtcggctcacgagggctgcctcccgccgttcccagcggacgttttcatgattcctcagtacgggtatctgacgcttaatgatggaagccaggccgtgggtcgttcgtccttttactgcctggaatatttcccgtcgcaaatgctaagaacgggtaacaacttccagttcaactacgagtttgagaacgtacctttccatagcagctacgctcacagccaaagcctggaccgactaatgaatccactcatcgaccaatacttgtactatctctcaaagactattaacgattctggacagaatcaacaaacgctaaaattcagtgtggccggacccagcaacatggctgtccagggaagaaactacatacctggacccagctaccgacaacaacgtgtctcaaccactgtgactcaaaacaacaacagcgaatttgcttggcctggagcttcttcttgggctctcaatggacgtaatagcttgatgaatcctggacctgctatggccagccacaaagaaggagaggaccgtttctttcctttgtctggatctttaatttttggcaaacaaggaactggaagagacaacgtggatgcggacgaagtcatgataaccaacgaagaagaaattaaaactactaacccggtagcaacggagtcctatggacaagtggccataaaccaccagagtgcccaagcacaggcgcagaccggctgggttcaaaaccaaggaatacttccgggtatggtttggcaggacagagatgtgtacctgcaaggacccatttgggccaaaattcctcacacggacggcaactttcacccttctccgctgatgggagggtttggaatgaagcacccgcctcctcagatcctcatcaaaaacacacctgtacctgcggatcctccaacggccttcaacaaggacaagctgaactctttcatcacccagtattctactggccaagtcagcgtggagatcgagtgggagctgcagaaggaaaacagcaagcgctggaacccggagatccagtacacttccaactattacaagtctaataatgttgaatttgctgttaatactgaaggtgtatatagtgaaccccgccccattggcaccagatacctgactcgtaatctgtaa

SEQ ID NO: 969 - protein, 726 aa, Artificial Sequence
  Description of Artificial Sequence: Synthetic polypeptide
MEVQLQASGGGLVQAGGSLRLSCAASGFKITHYTMGWFRQAPGKEREFVSRITWGGDNTFYSNSVKGRFTISRDNAKNTVYLQMNSLKPEDTADYYCAAGSTSTATPLRVDYWGKGTQVTVSSGGGGSAPGKKRPVEQSPQEPDSSSGIGKTGQQPAKKRLNFGQTGDSESVPDPQPLGEPPAAPSGLGPNTMASGGGAPMADNNEGADGVGNSSGNWHCDSTWLGDRVITTSTRTWALPTYNNHLYKQISNGTSGGSTNDNTYFGYSTPWGYFDFNRFHCHFSPRDWQRLINNNWGFRPKRLNFKLFNIQVKEVTTNEGTKTIANNLTSTVQVFTDSEYQLPYVLGSAHQGCLPPFPADVFMVPQYGYLTLNNGSQALGRSSFYCLEYFPSQMLRTGNNFQFSYTFEDVPFHSSYAHSQSLDRLMNPLIDQYLYYLVRTQTTGTGGTQTLAFSQAGPSSMANQARNWVPGPCYRQQRVSTTTNQNNNSNFAWTGAAKFKLNGRDSLMNPGVAMASHKDDDDRFFPSSGVLIFGKQGAGNDGVDYSQVLITDEEEIKATNPVATEEYGAVAINNQAANTQAQTGLVHNQGVIPGMVWQNRDVYLQGPIWAKIPHTDGNFHPSPLMGGFGLKHPPPQILIKNTPVPADPPLTFNQAKLNSFITQYSTGQVSVEIEWELQKENSKRWNPEIQYTSNYYKSTNVDFAVNTEGVYSEPRPIGTRYLTRNL

SEQ ID NO: 970 - protein, 729 aa, Artificial Sequence
  Description of Artificial Sequence: Synthetic polypeptide
MEVQLQASGGGLVQAGGSLRLSCSASVRTFSIYAMGWFRQAPGKEREFVAGINRSGDVTKYADFVKGRFSISRDNAKNMVYLQMNSLKPEDTALYYCAATWAYDTVGALTSGYNFWGQGTQVTVSSGGGGSAPGKKRPVEQSPQEPDSSSGIGKTGQQPAKKRLNFGQTGDSESVPDPQPLGEPPAAPSGLGPNTMASGGGAPMADNNEGADGVGNSSGNWHCDSTWLGDRVITTSTRTWALPTYNNHLYKQISNGTSGGSTNDNTYFGYSTPWGYFDFNRFHCHFSPRDWQRLINNNWGFRPKRLNFKLFNIQVKEVTTNEGTKTIANNLTSTVQVFTDSEYQLPYVLGSAHQGCLPPFPADVFMVPQYGYLTLNNGSQALGRSSFYCLEYFPSQMLRTGNNFQFSYTFEDVPFHSSYAHSQSLDRLMNPLIDQYLYYLVRTQTTGTGGTQTLAFSQAGPSSMANQARNWVPGPCYRQQRVSTTTNQNNNSNFAWTGAAKFKLNGRDSLMNPGVAMASHKDDDDRFFPSSGVLIFGKQGAGNDGVDYSQVLITDEEEIKATNPVATEEYGAVAINNQAANTQAQTGLVHNQGVIPGMVWQNRDVYLQGPIWAKIPHTDGNFHPSPLMGGFGLKHPPPQILIKNTPVPADPPLTFNQAKLNSFITQYSTGQVSVEIEWELQKENSKRWNPEIQYTSNYYKSTNVDFAVNTEGVYSEPRPIGTRYLTRNL

SEQ ID NO: 971 - protein, 651 aa, Artificial Sequence
  Description of Artificial Sequence: Synthetic polypeptide
MPSSVIDALQYKLEGTTRLTRKRGLKLATALSLSNKFVEGSPSGGGGSGGGGSAPGKKRPVEQSPQEPDSSSGIGKTGQQPAKKRLNFGQTGDSESVPDPQPLGEPPAAPSGLGPNTMASGGGAPMADNNEGADGVGNSSGNWHCDSTWLGDRVITTSTRTWALPTYNNHLYKQISNGTSGGSTNDNTYFGYSTPWGYFDFNRFHCHFSPRDWQRLINNNWGFRPKRLNFKLFNIQVKEVTTNEGTKTIANNLTSTVQVFTDSEYQLPYVLGSAHQGCLPPFPADVFMVPQYGYLTLNNGSQALGRSSFYCLEYFPSQMLRTGNNFQFSYTFEDVPFHSSYAHSQSLDRLMNPLIDQYLYYLVRTQTTGTGGTQTLAFSQAGPSSMANQARNWVPGPCYRQQRVSTTTNQNNNSNFAWTGAAKFKLNGRDSLMNPGVAMASHKDDDDRFFPSSGVLIFGKQGAGNDGVDYSQVLITDEEEIKATNPVATEEYGAVAINNQAANTQAQTGLVHNQGVIPGMVWQNRDVYLQGPIWAKIPHTDGNFHPSPLMGGFGLKHPPPQILIKNTPVPADPPLTFNQAKLNSFITQYSTGQVSVEIEWELQKENSKRWNPEIQYTSNYYKSTNVDFAVNTEGVYSEPRPIGTRYLTRNL

SEQ ID NO: 972 - protein, 638 aa, Artificial Sequence
  Description of Artificial Sequence: Synthetic polypeptide
MYTIWMPENPRPGTPCDIFTNSRGKRASNGGGGGSGGGGSAPGKKRPVEQSPQEPDSSSGIGKTGQQPAKKRLNFGQTGDSESVPDPQPLGEPPAAPSGLGPNTMASGGGAPMADNNEGADGVGNSSGNWHCDSTWLGDRVITTSTRTWALPTYNNHLYKQISNGTSGGSTNDNTYFGYSTPWGYFDFNRFHCHFSPRDWQRLINNNWGFRPKRLNFKLFNIQVKEVTTNEGTKTIANNLTSTVQVFTDSEYQLPYVLGSAHQGCLPPFPADVFMVPQYGYLTLNNGSQALGRSSFYCLEYFPSQMLRTGNNFQFSYTFEDVPFHSSYAHSQSLDRLMNPLIDQYLYYLVRTQTTGTGGTQTLAFSQAGPSSMANQARNWVPGPCYRQQRVSTTTNQNNNSNFAWTGAAKFKLNGRDSLMNPGVAMASHKDDDDRFFPSSGVLIFGKQGAGNDGVDYSQVLITDEEEIKATNPVATEEYGAVAINNQAANTQAQTGLVHNQGVIPGMVWQNRDVYLQGPIWAKIPHTDGNFHPSPLMGGFGLKHPPPQILIKNTPVPADPPLTFNQAKLNSFITQYSTGQVSVEIEWELQKENSKRWNPEIQYTSNYYKSTNVDFAVNTEGVYSEPRPIGTRYLTRNL

SEQ ID NO: 973 - protein, 628 aa, Artificial Sequence
  Description of Artificial Sequence: Synthetic polypeptide
MTFFYGGSRGKRNNFKTEEYGGGGSGGGGSAPGKKRPVEQSPQEPDSSSGIGKTGQQPAKKRLNFGQTGDSESVPDPQPLGEPPAAPSGLGPNTMASGGGAPMADNNEGADGVGNSSGNWHCDSTWLGDRVITTSTRTWALPTYNNHLYKQISNGTSGGSTNDNTYFGYSTPWGYFDFNRFHCHFSPRDWQRLINNNWGFRPKRLNFKLFNIQVKEVTTNEGTKTIANNLTSTVQVFTDSEYQLPYVLGSAHQGCLPPFPADVFMVPQYGYLTLNNGSQALGRSSFYCLEYFPSQMLRTGNNFQFSYTFEDVPFHSSYAHSQSLDRLMNPLIDQYLYYLVRTQTTGTGGTQTLAFSQAGPSSMANQARNWVPGPCYRQQRVSTTTNQNNNSNFAWTGAAKFKLNGRDSLMNPGVAMASHKDDDDRFFPSSGVLIFGKQGAGNDGVDYSQVLITDEEEIKATNPVATEEYGAVAINNQAANTQAQTGLVHNQGVIPGMVWQNRDVYLQGPIWAKIPHTDGNFHPSPLMGGFGLKHPPPQILIKNTPVPADPPLTFNQAKLNSFITQYSTGQVSVEIEWELQKENSKRWNPEIQYTSNYYKSTNVDFAVNTEGVYSEPRPIGTRYLTRNL

SEQ ID NO: 974 - protein, 621 aa, Artificial Sequence
  Description of Artificial Sequence: Synthetic polypeptide
MNNQKIVNLKEKVAQLEAGGGGSAPGKKRPVEQSPQEPDSSAGIGKSGAQPAKKRLNFGQTGDTESVPDPQPIGEPPAAPSGVGSLTMASGGGAPVADNNEGADGVGSSSGNWHCDSQWLGDRVITTSTRTWALPTYNNHLYKQISNSTSGGSSNDNAYFGYSTPWGYFDFNRFHCHFSPRDWQRLINNNWGFRPKRLNFKLFNIQVKEVTDNNGVKTIANNLTSTVQVFTDSDYQLPYVLGSAHEGCLPPFPADVFMIPQYGYLTLNDGSQAVGRSSFYCLEYFPSQMLRTGNNFQFNYEFENVPFHSSYAHSQSLDRLMNPLIDQYLYYLSKTINDSGQNQQTLKFSVAGPSNMAVQGRNYIPGPSYRQQRVSTTVTQNNNSEFAWPGASSWALNGRNSLMNPGPAMASHKEGEDRFFPLSGSLIFGKQGTGRDNVDADEVMITNEEEIKTTNPVATESYGQVAINHQSAQAQAQTGWVQNQGILPGMVWQDRDVYLQGPIWAKIPHTDGNFHPSPLMGGFGMKHPPPQILIKNTPVPADPPTAFNKDKLNSFITQYSTGQVSVEIEWELQKENSKRWNPEIQYTSNYYKSNNVEFAVNTEGVYSEPRPIGTRYLTRNL

SEQ ID NO: 975 - protein, 633 aa, Artificial Sequence
  Description of Artificial Sequence: Synthetic polypeptide
MYTIWMPENPRPGTPCDIFTNSRGKRASNGGGGGSAPGKKRPVEQSPQEPDSSAGIGKSGAQPAKKRLNFGQTGDTESVPDPQPIGEPPAAPSGVGSLTMASGGGAPVADNNEGADGVGSSSGNWHCDSQWLGDRVITTSTRTWALPTYNNHLYKQISNSTSGGSSNDNAYFGYSTPWGYFDFNRFHCHFSPRDWQRLINNNWGFRPKRLNFKLFNIQVKEVTDNNGVKTIANNLTSTVQVFTDSDYQLPYVLGSAHEGCLPPFPADVFMIPQYGYLTLNDGSQAVGRSSFYCLEYFPSQMLRTGNNFQFNYEFENVPFHSSYAHSQSLDRLMNPLIDQYLYYLSKTINDSGQNQQTLKFSVAGPSNMAVQGRNYIPGPSYRQQRVSTTVTQNNNSEFAWPGASSWALNGRNSLMNPGPAMASHKEGEDRFFPLSGSLIFGKQGTGRDNVDADEVMITNEEEIKTTNPVATESYGQVAINHQSAQAQAQTGWVQNQGILPGMVWQDRDVYLQGPIWAKIPHTDGNFHPSPLMGGFGMKHPPPQILIKNTPVPADPPTAFNKDKLNSFITQYSTGQVSVEIEWELQKENSKRWNPEIQYTSNYYKSNNVEFAVNTEGVYSEPRPIGTRYLTRNL

SEQ ID NO: 976 - protein, 623 aa, Artificial Sequence
  Description of Artificial Sequence: Synthetic polypeptide
MTFFYGGSRGKRNNFKTEEYGGGGSAPGKKRPVEQSPQEPDSSAGIGKSGAQPAKKRLNFGQTGDTESVPDPQPIGEPPAAPSGVGSLTMASGGGAPVADNNEGADGVGSSSGNWHCDSQWLGDRVITTSTRTWALPTYNNHLYKQISNSTSGGSSNDNAYFGYSTPWGYFDFNRFHCHFSPRDWQRLINNNWGFRPKRLNFKLFNIQVKEVTDNNGVKTIANNLTSTVQVFTDSDYQLPYVLGSAHEGCLPPFPADVFMIPQYGYLTLNDGSQAVGRSSFYCLEYFPSQMLRTGNNFQFNYEFENVPFHSSYAHSQSLDRLMNPLIDQYLYYLSKTINDSGQNQQTLKFSVAGPSNMAVQGRNYIPGPSYRQQRVSTTVTQNNNSEFAWPGASSWALNGRNSLMNPGPAMASHKEGEDRFFPLSGSLIFGKQGTGRDNVDADEVMITNEEEIKTTNPVATESYGQVAINHQSAQAQAQTGWVQNQGILPGMVWQDRDVYLQGPIWAKIPHTDGNFHPSPLMGGFGMKHPPPQILIKNTPVPADPPTAFNKDKLNSFITQYSTGQVSVEIEWELQKENSKRWNPEIQYTSNYYKSNNVEFAVNTEGVYSEPRPIGTRYLTRNL

SEQ ID NO: 977 - protein, 623 aa, Artificial Sequence
  Description of Artificial Sequence: Synthetic polypeptide
MAAAAAAAAAAAAAAAAAAAGGGGSAPGKKRPVEQSPQEPDSSAGIGKSGAQPAKKRLNFGQTGDTESVPDPQPIGEPPAAPSGVGSLTMASGGGAPVADNNEGADGVGSSSGNWHCDSQWLGDRVITTSTRTWALPTYNNHLYKQISNSTSGGSSNDNAYFGYSTPWGYFDFNRFHCHFSPRDWQRLINNNWGFRPKRLNFKLFNIQVKEVTDNNGVKTIANNLTSTVQVFTDSDYQLPYVLGSAHEGCLPPFPADVFMIPQYGYLTLNDGSQAVGRSSFYCLEYFPSQMLRTGNNFQFNYEFENVPFHSSYAHSQSLDRLMNPLIDQYLYYLSKTINDSGQNQQTLKFSVAGPSNMAVQGRNYIPGPSYRQQRVSTTVTQNNNSEFAWPGASSWALNGRNSLMNPGPAMASHKEGEDRFFPLSGSLIFGKQGTGRDNVDADEVMITNEEEIKTTNPVATESYGQVAINHQSAQAQAQTGWVQNQGILPGMVWQDRDVYLQGPIWAKIPHTDGNFHPSPLMGGFGMKHPPPQILIKNTPVPADPPTAFNKDKLNSFITQYSTGQVSVEIEWELQKENSKRWNPEIQYTSNYYKSNNVEFAVNTEGVYSEPRPIGTRYLTRNL

SEQ ID NO: 978 - DNA, 2214 bp, Artificial Sequence
  Description of Artificial Sequence: Synthetic polynucleotide
atggctgccgatggttatcttccagattggctcgaggacaacctctctgagggcattcgcgagtggtgggacttgaaacctggagccccgaagcccaaagccaaccagcaaaagcaggacgacggccggggtctggtgcttcctggctacaagtacctcggacccttcaacggactcgacaagggggagcccgtcaacgcggcggacgcagcggccctcgagcacgacaaggcctacgaccagcagctcaaagcgggtgacaatccgtacctgcggtataaccacgccgacgtcgagtttcaggagcgtctgcaagaagatacgtcttttgggggcaacctcgggcgagcagtcttccaggccaagaagagggttctcgaaccttttggtctggttgaggaaggcgctaagacggctcctggaaagaaacgtccggtagagcagtcgccacaagagccagactcctcctcgggcatcggcaagaaaggccaacagcccgccagaaaaagactcaattttggccagactggcgactcagagtcagttccagaccctcaacctctcggagaacctccagcagcgccctctggtgtgggacctaatacaatggctgcaggcggtggcgcaccaatggcagacaataacgagggcgccgacggagtgggtaattcctcgggaaattggcattgcgattccacatggatgggggacagagtcatcaccaccagcacccgaacctgggccctgcccacctacaacaaccacctctacaagcaaatctccaacggcacctcgggaggaagcaccaacgacaacacctattttggctacagcaccccctgggggtattttgatttcaacagattccactgccacttctcaccacgtgactggcagcgactcatcaacaacaactggggattccggccaaaaagactcagcttcaagctcttcaacatccaggtcaaggaggtcacgcagaatgaaggcaccaagaccatcgccaataaccttaccagcacgattcaggtatttacggactcggaataccagctgccatacgtcctcggctccgcgcaccagggctgcctgcctccgttcccggcggacgtcttcatgattccccagtacggctaccttacactgaacaatggaagtcaagccgtaggccgttcctccttctactgcctggaatattttccttctcaaatgctgagaacgggcaacaactttgagttcagctaccagtttgaggacgtgccttttcacagcagctacgcgcacagccaaagcctggaccggctgatgaaccccctcatcgaccagtacctgtactacctgtctcggactcagtccacgggaggtaccgcaagaactcagcagttgctattttctcaggccgggcctaatacaatggccaatcaggcaaagaactggctgccaggaccctgttaccgccaacaacgcgtctcaacgacaaccgggcaaaacaacaatagcaactctgcctggactgctgggaccaaataccatctgaatggaagaaattcattggctaatcctggcatcgctatggcaacacacaaagacgacgaggagcgtttttttcccagtaacgggatcctgatttttggcaaacaaaatgctgccagagacaatgcggattacagcgatgtcatgctcaccagcgaggaagaaatcaaaaccactaaccctgtggctacagaggaatacggtatcgtggcagataacttgcagcagcaaaacacggctcctcaaattggaactgtcaacagccagggggccttacccggtatggtctggcagaaccgggacgtgtacctgcagggtcccatctgggccaagattcctcacacggacggcaacttccacccatctccgctgatgggcggctttggcctgaaacatcctccgcctcagatcctgatcaagaacacgcctgtacctgcggatcctccgaccaccttcaaccagtcaaagctgaactctttcatcacgcaatacagcaccggacaggtcagcgtggaaattgaatgggagctacagaaggaaaacagcaagcgctggaaccccgagatccagtacacctccaactactacaaatctacaagtgtggactttgctgttaatacagaaggcgtgtactctgaaccccgccccattggcacccgttacctcacccgtaatctgtaa

SEQ ID NO: 979 - DNA, 2214 bp, Artificial Sequence
  Description of Artificial Sequence: Synthetic polynucleotide
atggctgccgatggttatcttccagattggctcgaggacaacctctctgagggcattcgcgagtggtgggcgctgaaacctggagccccgaagcccaaagccaaccagcaaaagcaggacgacggccggggtctggtgcttcctggctacaagtacctcggacccttcaacggactcgacaagggggagcccgtcaacgcggcggacgcagcggccctcgagcacgacaaggcctacgaccagcagctcaaagcgggtgacaatccgtacctgcggtataaccacgccgacgccgagtttcaggagcgtctgcaagaagatacgtcttttgggggcaacctcgggcgagcagtcttccaggccaagaagcgggttctcgaacctctcggtctggttgaggacggcgctaagacggctcctggaaagaagagaccagtagagcagtcaccccaagaaccagactcctcctcgggcatcggcaagaaaggccaacagcccgccagaaaaagactcaattttggccagactggcgactcagagtcagttccagaccctcaacctctcggagaacctccagcaacccccgctgctgtgggacctactacaatggcttcaggcggtggcgcaccaatggcagacaataacgaaggcgccgacggagtgggtagttcctcgggaaattggcattgcgattccacatggctgggcgacagagtcatcaccaccagcacccgaacctgggccctgcccacctacaacaaccacctctacaagcaaatctccaacgggacatcgggaggagccaccaacgacaacacctacttcggctacagcaccccctgggggtattttgactttaacagattccactgccacttttcaccacgtgactggcagcgactcatcaacaacaactggggattccggcccaagagactcagcttcaagctcttcaacatccaggtcaaggaggtcacgcagaatgaaggcaccaagaccatcgccaataacctcaccagcaccatccaggtgtttacggactcggagtaccagctgccgtacgttctcggctctgcccaccagggctgcctgcctccgttcccggcggacgtgttcatgattccccagtacggctacctaacactcaacaacggtagtcaggccgtgggacgctcctccttctactgcctggaatactttccttcgcagatgctgagaaccggcaacaacttccagtttacttacaccttcgaggacgtgcctttccacagcagctacgcccacagccagagcttggaccggctgatgaatcctctgattgaccagtacctgtactacttgtctcggactcaaacaacaggaggcacggcaaatacgcagactctgggcttcagccaaggtgggcctaatacaatggccaatcaggcaaagaactggctgccaggaccctgttaccgccaacaacgcgtctcaacgacaaccgggcaaaacaacaatagcaactttgcctggactgctgggaccaaataccatctgaatggaagaaattcattggctaatcctggcatcgctatggcaacacacaaggacgacgaggagcgtttttttcccagtaacgggatcctgatttttggcaaacaaaatgctgccagagacaatgcggattacagcgatgtcatgctcaccagcgaggaagaaatcaaaaccactaaccctgtggctacagaggaatacggtatcgtggcagataacttgcagcagcaaaacacggctcctcaaattggaactgtcaacagccagggggccttacccggtatggtctggcagaaccgggacgtgtacctgcagggtcccatctgggccaagattcctcacacggacggcaacttccacccgtctccgctgatgggcggctttggcctgaaacatcctccgcctcagatcctgatcaagaacacgcctgtacctgcggatcctccgaccaccttcaaccagtcaaagctgaactctttcatcacgcaatacagcaccggacaggtcagcgtggaaatcgagtgggagctgcagaaagaaaacagcaagcgctggaaccccgagatccagtacacctccaactactacaaatctacaaatgtggactttgctgtcaacacggagggggtttatagcgagcctcgccccattggcacccgttacctcacccgcaacctgtaa

SEQ ID NO: 980 - DNA, 2211 bp, Artificial Sequence
  Description of Artificial Sequence: Synthetic polynucleotide
  modified_base (715)..(715): a, c, g, or t
atggctgccgatggttatcttccagattggctcgaggacaacctctctgagggcattcgcgagtggtgggcgctgaaacctggagccccgaagcccaaagccaaccagcaaaagcaggacgacggccggggtctggtgcttcctggctacaagtacctcggacccttcaacggactcgacaagggggagcccgtcaacgcggcggacgcagcggccctcgagcacgacaaggcctacgaccagcagctcaaagcgggtgacaatccgtacctgcggtataaccacgccgacgccgagtttcaggagcgtctgcaagaagatacgtcttttgggggcaacctcgggcgagcagtcttccaggccaagaagcgggttctcgaacctctcggtctggttgaggaaggcgctaagacggctcctggaaagaaacgtccggtagagcagtcgccacaagagccagactcctcctcgggcatcggcaagacaggccagcagcccgctaaaaagaggctcaattttggtcagactggcgactcagagtcagtccccgacccacaacctctcggagaacctccagcaacccccgctgctgtgggacctactacaatggcttcaggcggtggcgcaccaatggcagacaataacgaaggcgccgacggagtgggtaatgcctcaggaaattggcattgcgattccacatggctgggcgacagantcatcaccaccagcacccgaacatgggccttgcccacctataacaaccacctctacaagcaaatctccagtgcttcaacgggggccagcaacgacaaccactacttcggctacagcaccccctgggggtattttgatttcaacagattccactgccatttctcaccacgtgactggcagcgactcatcaacaacaattggggattccggcccaagagactcaacttcaagctcttcaacatccaagtcaaggaggtcacgcagaatgaaggcaccaagaccatcgccaataacctcaccagcaccatccaggtgtttacggactcggagtaccagctgccgtacgttctcggctctgcccaccagggctgcctgcctccgttcccggcggacgtgttcatgattccccagtacggctacctaacactcaacaacggtagtcaggccgtgggacgctcctccttctactgcctggaatattttccatctcaaatgctgcgaactggaaacaattttgaattcagctacaccttcgaggacgtgcctttccacagcagctacgcacacagccagagcttggaccgactgatgaatcctctcatcgaccagtacctgtactacttgtctcggactcaaacaacaggaggcacggcaaatacgcagactctgggcttcagccaaggtgggcctaatacaatggccaatcaggcaaagaactggctgccaggaccctgttaccgccaacaacgcgtctcaacgacaaccgggcaaaacaacaatagcaactttgcctggactgctgggaccaaataccatctgaatggaagaaattcattggctaatcctggcatcgctatggcaacacacaaagacgacgaggagcgtttttttcccagtaacgggatcctgatttttggcaaacaaaatgctgccagagacaatgcggattacagcgatgtcatgctcaccagcgaggaagaaatcaaaaccactaaccctgtggctacagaggaatacggtatcgtggcagataacttgcagcagcaaaacacggctcctcaaattggaactgtcaacagccaggggaccttacccggtatggtctggcagaaccgggacgtgtacctgcagggtcccatctgggccaagattcctcacacggacggcaacttccacccgtctccgctgatgggcggctttggcctgaaacatcctccgcctcagatcctgatcaagaacacgcctgtacctgcggatcctccgaccaccttcaaccagtcaaagctgaactctttcatcacgcaatacagcaccggacaggtcagcgtggaaattgaatgggagctacagaaggaaaacagcaagcgctggaaccccgagatccagtacacctccaattactacaaatctacaagtgtggactttgctgttaatacagaaggcgtgtactctgaaccccgccccattggcacgcgtttcctcacccgtaatctgtaa

SEQ ID NO: 981 - DNA, 2214 bp, Artificial Sequence
  Description of Artificial Sequence: Synthetic polynucleotide
atggctgccgatggttatcttccagattggctcgaggacaacctctctgagggcattcgcgagtggtgggcgctgaaacctggagccccgaagcccaaagccaaccagcaaaagcaggacgacggccggggtctggtgcttcctggctacaagtacctcggacccttcaacggactcgacaagggggagcccgtcaacgcggcggacgcagcggccctcgagcacgacaaggcctacgaccagcagctcaaagcgggtgacaatccgtacctgcggtataaccacgccgacgccgagtttcaggagcgtctgcaagaagatacgtcttttgggggcaacctcgggcgagcagtcttccaggccaagaagcgggttctcgaacctctcggtctggttgaggaaggcgctaagacggctcctggaaagaaacgtccggtagagcagtcgccacaagagccagactcctcctcgggcatcggcaagacaggccagcagcccgctaaaaagaggctcaattttggccagactggcgactcagagtcagttccagaccctcaacctctcggagaacctccagcagcgccctctggtgtgggacctaatacaatggctgcaggcggtggcgcaccaatggcagacaataacgaaggcgccgacggagtgggtagttcctcgggaaattggcattgcgattccacatggctgggcgacagagtcatcaccaccagcacccgaacctgggccctgcccacctacaacaaccacctctacaagcaaatctccaacgggacatcgggaggagccaccaacgacaacacctacttcggctacagcaccccctgggggtattttgactttaacagattccactgccacttttcaccacgtgactggcagcgactcatcaacaacaactggggattccggcccaagagactcagcttcaagctcttcaacatccaggtcaaggaggtcacgcagaatgaaggcaccaagaccatcgccaataacctcaccagcaccatccaggtgtttacggactcggagtaccagctgccgtacgtactaggatccgctcaccagggatgtctgcctccgttcccggcggacgtgttcatgattccccagtacggctacctaacactcaacaacggtagtcaggccgtgggacgctcctccttctactgcctggaatattttccatctcagatgctgagaacgggcaataactttaccttcagctacaccttcgaggacgtgcctttccacagcagctatgcccacagccagagcttggaccggctgatgaatcctctgattgaccagtacctgtactacttgtctcggactcaaacaacaggaggcacggcaaatacgcagactctgggcttcagccaaggtgggcctaatacaatggccaatcaggcaaagaactggctgccaggaccctgttaccgccaacaacgcgtctcaacgacaaccgggcaaaacaacaatagcaactttgcctggactgctgggaccaaataccatctgaatggaagaaattcattggctaatcctggcatcgctatggcaacacacaaagacgacgaggagcgtttttttcccagtaacgggatcctgatttttggcaaacaaaatgctgccagagacaatgcggattacagcgatgtcatgctcaccagcgaggaagaaatcaaaaccactaaccctgtggctacagaggaatacggtatcgtggcagataacttgcagcagcaaaacacggctcctcaaattggaactgtcaacagccagggggccttacccggtatggtctggcagaaccgggacgtgtacctgcagggtcccatctgggccaagattcctcacacggacggcaacttccacccgtctccgctaatgggaggatttggactgaagcacccacctcctcagatcctgatcaagaacacgccggtacctgcggatcctccgaccaccttcaaccagtcaaagctgtactctttcatcacgcaatacagcaccggacaggtcagcgtggaaattgaatgggagctgcagaaggaaaacagcaagcgctggaaccccgagatccaatacacctccaactactacaaatctacaagtgtggactttgctgttaatacagaaggcgtgtactctgaaccccgccccattggcacccgttacctcacccgtaatctgtaa

SEQ ID NO: 982 - protein, 737 aa, Artificial Sequence
  Description of Artificial Sequence: Synthetic polypeptide
MAADGYLPDWLEDNLSEGIREWWDLKPGAPKPKANQQKQDDGRGLVLPGYKYLGPFNGLDKGEPVNAADAAALEHDKAYDQQLKAGDNPYLRYNHADVEFQERLQEDTSFGGNLGRAVFQAKKRVLEPFGLVEEGAKTAPGKKRPVEQSPQEPDSSSGIGKKGQQPARKRLNFGQTGDSESVPDPQPLGEPPAAPSGVGPNTMAAGGGAPMADNNEGADGVGNSSGNWHCDSTWMGDRVITTSTRTWALPTYNNHLYKQISNGTSGGSTNDNTYFGYSTPWGYFDFNRFHCHFSPRDWQRLINNNWGFRPKRLSFKLFNIQVKEVTQNEGTKTIANNLTSTIQVFTDSEYQLPYVLGSAHQGCLPPFPADVFMIPQYGYLTLNNGSQAVGRSSFYCLEYFPSQMLRTGNNFEFSYQFEDVPFHSSYAHSQSLDRLMNPLIDQYLYYLSRTQSTGGTARTQQLLFSQAGPNTMANQAKNWLPGPCYRQQRVSTTTGQNNNSNSAWTAGTKYHLNGRNSLANPGIAMATHKDDEERFFPSNGILIFGKQNAARDNADYSDVMLTSEEEIKTTNPVATEEYGIVADNLQQQNTAPQIGTVNSQGALPGMVWQNRDVYLQGPIWAKIPHTDGNFHPSPLMGGFGLKHPPPQILIKNTPVPADPPTTFNQSKLNSFITQYSTGQVSVEIEWELQKENSKRWNPEIQYTSNYYKSTSVDFAVNTEGVYSEPRPIGTRYLTRNL

SEQ ID NO: 983 - protein, 737 aa, Artificial Sequence
  Description of Artificial Sequence: Synthetic polypeptide
MAADGYLPDWLEDNLSEGIREWWALKPGAPKPKANQQKQDDGRGLVLPGYKYLGPFNGLDKGEPVNAADAAALEHDKAYDQQLKAGDNPYLRYNHADAEFQERLQEDTSFGGNLGRAVFQAKKRVLEPLGLVEDGAKTAPGKKRPVEQSPQEPDSSSGIGKKGQQPARKRLNFGQTGDSESVPDPQPLGEPPATPAAVGPTTMASGGGAPMADNNEGADGVGSSSGNWHCDSTWLGDRVITTSTRTWALPTYNNHLYKQISNGTSGGATNDNTYFGYSTPWGYFDFNRFHCHFSPRDWQRLINNNWGFRPKRLSFKLFNIQVKEVTQNEGTKTIANNLTSTIQVFTDSEYQLPYVLGSAHQGCLPPFPADVFMIPQYGYLTLNNGSQAVGRSSFYCLEYFPSQMLRTGNNFQFTYTFEDVPFHSSYAHSQSLDRLMNPLIDQYLYYLSRTQTTGGTANTQTLGFSQGGPNTMANQAKNWLPGPCYRQQRVSTTTGQNNNSNFAWTAGTKYHLNGRNSLANPGIAMATHKDDEERFFPSNGILIFGKQNAARDNADYSDVMLTSEEEIKTTNPVATEEYGIVADNLQQQNTAPQIGTVNSQGALPGMVWQNRDVYLQGPIWAKIPHTDGNFHPSPLMGGFGLKHPPPQILIKNTPVPADPPTTFNQSKLNSFITQYSTGQVSVEIEWELQKENSKRWNPEIQYTSNYYKSTNVDFAVNTEGVYSEPRPIGTRYLTRNL

SEQ ID NO: 984 - protein, 736 aa, Artificial Sequence
  Description of Artificial Sequence: Synthetic polypeptide
  MOD_RES (239)..(239): Any naturally occurring amino acid
MAADGYLPDWLEDNLSEGIREWWALKPGAPKPKANQQKQDDGRGLVLPGYKYLGPFNGLDKGEPVNAADAAALEHDKAYDQQLKAGDNPYLRYNHADAEFQERLQEDTSFGGNLGRAVFQAKKRVLEPLGLVEEGAKTAPGKKRPVEQSPQEPDSSSGIGKTGQQPAKKRLNFGQTGDSESVPDPQPLGEPPATPAAVGPTTMASGGGAPMADNNEGADGVGNASGNWHCDSTWLGDRXITTSTRTWALPTYNNHLYKQISSASTGASNDNHYFGYSTPWGYFDFNRFHCHFSPRDWQRLINNNWGFRPKRLNFKLFNIQVKEVTQNEGTKTIANNLTSTIQVFTDSEYQLPYVLGSAHQGCLPPFPADVFMIPQYGYLTLNNGSQAVGRSSFYCLEYFPSQMLRTGNNFEFSYTFEDVPFHSSYAHSQSLDRLMNPLIDQYLYYLSRTQTTGGTANTQTLGFSQGGPNTMANQAKNWLPGPCYRQQRVSTTTGQNNNSNFAWTAGTKYHLNGRNSLANPGIAMATHKDDEERFFPSNGILIFGKQNAARDNADYSDVMLTSEEEIKTTNPVATEEYGIVADNLQQQNTAPQIGTVNSQGTLPGMVWQNRDVYLQGPIWAKIPHTDGNFHPSPLMGGFGLKHPPPQILIKNTPVPADPPTTFNQSKLNSFITQYSTGQVSVEIEWELQKENSKRWNPEIQYTSNYYKSTSVDFAVNTEGVYSEPRPIGTRFLTRNL

SEQ ID NO: 985 - protein, 737 aa, Artificial Sequence
  Description of Artificial Sequence: Synthetic polypeptide
MAADGYLPDWLEDNLSEGIREWWALKPGAPKPKANQQKQDDGRGLVLPGYKYLGPFNGLDKGEPVNAADAAALEHDKAYDQQLKAGDNPYLRYNHADAEFQERLQEDTSFGGNLGRAVFQAKKRVLEPLGLVEEGAKTAPGKKRPVEQSPQEPDSSSGIGKTGQQPAKKRLNFGQTGDSESVPDPQPLGEPPAAPSGVGPNTMAAGGGAPMADNNEGADGVGSSSGNWHCDSTWLGDRVITTSTRTWALPTYNNHLYKQISNGTSGGATNDNTYFGYSTPWGYFDFNRFHCHFSPRDWQRLINNNWGFRPKRLSFKLFNIQVKEVTQNEGTKTIANNLTSTIQVFTDSEYQLPYVLGSAHQGCLPPFPADVFMIPQYGYLTLNNGSQAVGRSSFYCLEYFPSQMLRTGNNFTFSYTFEDVPFHSSYAHSQSLDRLMNPLIDQYLYYLSRTQTTGGTANTQTLGFSQGGPNTMANQAKNWLPGPCYRQQRVSTTTGQNNNSNFAWTAGTKYHLNGRNSLANPGIAMATHKDDEERFFPSNGILIFGKQNAARDNADYSDVMLTSEEEIKTTNPVATEEYGIVADNLQQQNTAPQIGTVNSQGALPGMVWQNRDVYLQGPIWAKIPHTDGNFHPSPLMGGFGLKHPPPQILIKNTPVPADPPTTFNQSKLYSFITQYSTGQVSVEIEWELQKENSKRWNPEIQYTSNYYKSTSVDFAVNTEGVYSEPRPIGTRYLTRNL

SEQ ID NO: 986 - DNA, 2208 bp, Artificial Sequence
  Description of Artificial Sequence: Synthetic polynucleotide
atggctgccgatggttatcttccagattggctcgaggacaacctctctgagggcattcgcgagtggtgggacttgaaacctggagccccgaaacccaaagccaaccagcaaaagcaggacgacggccggggtctggtgcttcctggctacaagtacctcggacccttcaacggactcgacaagggggagcccgtcaacgcggcggatgcagcggccctcgagcacgacaaagcctacgaccggcagctcgacagcggagacaacccgtacctcaagtacaaccacgccgacgcggagtttcaggagcgccttaaagaagatacgtcttttgggggcaacctcggacgagcagtcttccaggccaagaagagggttctcgaaccttttggtctggttgaggaaggtgctaagacggctcctggaaagaaacgtccggtagagcagtcgccacaagagccagactcctcctcgggcattggcaagacaggccagcagcccgctaaaaagagactcaattttggtcagactggcgactcagagtcagtccccgacccacaacctctcggagaacctccagcaacccccgctgctgtgggacctactacaatggcttcaggtggtggcgcaccagtggcagacaataacgaaggcgccgacggagtgggtagttcctcgggaaattggcattgcgattccacatggctgggcgacagagtcatcaccaccagcacccgaacatgggccttgcccacctataacaaccacctctacaagcaaatctccagtgcttcgacgggggccagcaacgacaaccactacttcggctacagcaccccctgggggtattttgatttcaacaggttccactgccatttctcaccacgtgactggcagcgactcatcaacaacaattggggattccggcccaaaagactcaacttcaagctgttcaacatccaggtcaaggaagtcacgacgaacgaaggcaccaagaccatcgccaataatctcaccagcaccgtgcaggtctttacggactcggagtaccagttaccgtacgtgctaggatccgctcaccagggatgtctgcctccgttcccggcggacgtcttcatggttcctcagtacggctatttaactttaaacaatggaagccaagccctgggacgttcctccttctactgtctggagtatttcccatcgcagatgctgagaacgggcaacaactttacctttagctacaccttcgaggacgtgcctttccacagcagctacgcgcacagccagagcctggacaggctgatgaatcccctcatcgaccagtacctgtactacctggtcagaacgcaaacgactggaactggagggacgcagactctggcattcagccaagcgggtcctagctcaatggccaaccaggctagaaattgggtgcccggaccttgctaccggcagcagcgcgtctccacgacaaccaaccagaacaacaacagcaactttgcctggacgggagctgccaagtttaagctgaacggccgagactctctaatgaatccgggcgtggcaatggcttcccacaaggatgacgacgaccgcttcttcccttcgagcggggtcctgatttttggcaagcaaggagccgggaacgatggagtggattacagccaagtgctgattacagatgaggaagaaatcaaggctaccaaccccgtggccacagaagaatatggagcagtggccatcaacaaccaggccgccaatacgcaggcgcagaccggactcgtgcacaaccagggggtgattcccggcatggtgtggcagaatagagacgtgtacctgcagggtcccatctgggccaaaattcctcacacggacggcaactttcacccgtctcccctgatgggcggctttggactgaagcacccgcctcctcaaattctcatcaagaacacaccggttccagcggacccgccgcttaccttcaaccaggccaagctgaactctttcatcacgcagtacagcaccggacaggtcagcgtggaaatcgagtgggagctgcagaaagaaaacagcaaacgctggaatccagagattcaatacacttccaactactacaaatctacaaatgtggactttgctgtcaacacggagggggtttatagcgagcctcgccccattggcacccgttacctcacccgcaacctgtaa

SEQ ID NO: 987 - DNA, 2211 bp, Artificial Sequence
  Description of Artificial Sequence: Synthetic polynucleotide
  modified_base (337)..(337): a, c, g, or t
atggctgccgatggttatcttccagattggctcgaggacactctctctgaaggaataagacagtggtggaagctcaaacctggcccaccaccaccaaagcccgcagagcggcataaggacgacagcaggggtcttgtgcttcctggctacaagtacctcggacccttcaacggactcgacaagggggagcccgtcaacgcggcggacgcagcgaccctcgagcacgacaaggcctacgaccagcagctcaaagcgggtgacaatccgtacctgcggtataaccacgccgacgccgagtttcaggagcgtctgcaagaagatacgtcttttgggggcnacctcgggcgagcagtcttccaggccaagaagcgggttctcgaacctctcggtctggttgaggaagctgctaagacggctcctggaaagaagagaccagtagagccatcaccccagcgttctccagactcctctacgggcatcggcaagaaaggccaacagcccgccagaaaaagactcaattttggtcagactggcgactcagagtcagttccagaccctcaacctctcggagaacctccagcagcgccctctggtgtgggacctaatacaatggctgcaggcggtggcgcaccaatggcagacaataacgaaggcgccgacggagtgggtagttcctcgggaaattggcattgcgattccacatggctgggcgacagagtcatcaccaccagcacccgaacctgggccctgcccacctacaacaaccacctctacaagcaaatctccagtgcttcaacgggggccagcaacgacaaccactacttcggctacagcaccccctgggggtattttgatttcaacagattccactgccatttctcaccacgtgactggcagcgactcatcaacaacaattggggattccggcccaagagactcaacttcaagctcttcaacatccaagtcaaggaggtcacgacgaatgatggcgtcacgaccatcgctaataaccttaccagcacggttcaagtcttctcggactcagactatcagctcccgtacgtgctcgggtcggctcacgagggctgcctcccgccgttcccagcggacgttttcatgattcctcagtacggctatttaactttaaacaatggaagccaagccctgggacgttcctccttctactgtctggagtatttcccatcgcagatgctgagaaccggcaacaactttcagttcagctacaccttcgaggacgtgcctttccacagcagctacgcgcacagccagagcctggacaggctgatgaatcccctcatcgaccagtacctgtactacctggtcagaacgcaaacgactggaactggagggacgcagactctggcattcagccaagcgggtcctagctcaatggccaaccaggctagaaattgggtgcccggaccttgctaccggcagcagcgcgtctccacgacaaccaaccagaacaacaacagcaactttgcctggacgggagctgccaagtttaagctgaacggccgagactctctaatgaatccgggcgtggcaatggcttcccacaaggatgacgacgaccgcttcttcccttcgagcggggtcctgatttttggcaagcaaggagccgggaacgatggagtggattacagccaagtgctgattacagatgaggaagaaatcaaggctaccaaccccgtagccacagaagaatatggagcagtggccatcaacaaccaggccgccaatacgcaggcgcagaccggactcgtgcacaaccagggggtgattcccggaatggtgtggcaagacagagacgtatacctgcagggtcctatttgggccaaaattcctcacacggatggacactttcacccgtctcctctcatgggcggctttggacttaagcacccgcctcctcagatcctcatcaaaaacacgcctgttcctgcgaatcctccggcagagttttcggctacaaagtttgcttcattcatcacccagtattccacaggacaagtgagcgtggagattgaatgggagctgcagaaagaaaacagcaaacgctggaatcccgaagtgcagtatacatctaactatgcaaaatctgccaacgttgatttcactgtggacaacaatggactttatactgagcctcgccccattggcacccgttacctcacccgtcccctgtaa

SEQ ID NO: 988 - DNA, 2214 bp, Artificial Sequence
  Description of Artificial Sequence: Synthetic polynucleotide
  modified_base (335)..(335): a, c, g, or t
atgactgacggttaccttccagattggctagaggacaacctctctgaaggcgttcgagagtggtgggcgctgcaacctggagccccgaagcccaaagccaaccagcaaaagcaggacgacggccggggtctggtgcttcctggctacaagtacctcggacccttcaacggactcgacaagggggagcccgtcaacgcggcggacgcagcggccctcgagcacgacaaggcctacgaccagcagctcaaagcgggtgacaatccgtacctgcggtataaccacgccgacgccgagtttcaggagcgtctgcaagaagatacgtcttttgggggcancctcgggcgagcagtcttccaggccaagaagcgggttctcgaacctctcggtctggttgaggaaggcgctaagacggctcctggaaagaaacgtccggtagagccatcaccccagcgttctccagactcctctacgggcatcggcaagaaaggccaacagcccgccagaaaaagactcaattttggtcagactggcgactcagagtcagttccagaccctcaacctctcggagaacctccagcagcgccctcaggtgtgggatctcttacaatggcttcaggtggtggcgcaccagtggcagacaataacgaaggtgccgatggagtgggtagttcctcgggaaattggcattgcgattcccaatggctgggggacagagtcatcaccaccagcacccgaacctgggccctgcccacctacaacaatcacctctacaagcaaatctccaacagcacatctggaggatcttcaaatgacaacgcctacttcggctacagcaccccctgggggtattttgacttcaacagattccactgccacttctcaccacgtgactggcagcgactcatcaacaacaactggggattccggcccaagagactcagcttcaagctcttcaacatccaggtcaaggaggtcacgcagaatgaaggcaccaagaccatcgccaataacctcaccagcaccatccaggtgtttacggactcggagtaccagctgccgtacgttctcggctctgcccaccagggctgcctgcctccgttcccggcggacgtgttcatgattccccagtacggctacctaacactcaacaacggtagtcaggccgtgggacgctcctccttctactgcctggaatactttccttcgcagatgctgagaaccggcaacaacttccagtttacttacaccttcgaggacgtgcctttccacagcagctacgcccacagccagagcttggaccggctgatgaatcctctgattgaccagtacctgtactacttgtctcggactcaaacaacaggaggcacggcaaatacgcagactctgggcttcagccaaggtgggcctaatacaatggccaatcaggcaaagaactggctgccaggaccctgttaccgccaacaacgcgtctcaacgacaaccgggcaaaacaacaatagcaactttgcctggactgctgggaccaaataccatctgaatggaagaaattcattggctaatcctggcatcgctatggcaacacacaaagacgacgaggagcgtttttttcccagtaacgggatcctgatttttggcaaacaaaatgctgccagagacaatgcggattacagcgatgtcatgctcaccagcgaggaagaaatcaaaaccactaaccctgtggctacagaggaatacggtatcgtggcagataacttgcagcagcaaaacacggctcctcaaattggaactgtcaacagccagggggccttacccggtatggtctggcagaaccgggacgtgtacctgcagggtcccatctgggccaagattcctcacacggacggcaacttccacccgtctccgctgatgggcggctttggcctgaaacatcctccgcctcagatcctgatcaagaacacgcctgtacctgcggatcctccgaccaccttaaaccaggccaagctgaactctttcatcacgcaatacagcaccggacaggtcagcgtggaaattgaatgggagctgcagaaggaaaacagcaagcgctggaacccagagattcagtacacttcaaactactacaaatctacaaatgtggactttgctgtcaatacagagggaacttatagtgaaccccgccccattggcaccagatttctgactcgtaatctgtaa

SEQ ID NO: 989 - DNA, 2211 bp, Artificial Sequence
  Description of Artificial Sequence: Synthetic polynucleotide
  modified_base (338)..(338): a, c, g, or t
atggctgccgatggttatcttccagattggctcgaggacactctctctgaaggaataagacagtggtggaagctcaaacctggcccaccaccaccaaagcccgcagagcggcataaggacgacagcaggggtcttgtgcttcctgggtacaagtacctcggccccttcaacggactcgacaagggggagcccgtcaacgcggcggacgcagcggccctcgagcacgacaaggcctacgaccagcagctcgaagcgggtgacaatccgtacctgcggtataaccacgccgacgccgagtttcaggagcgtctgcaagaagatacgtcttttgggggcancctcgggcgagcagtcttccaggccaagaagcgggttctcgaacctctcggtctggttgaggaaggcgctaagacggctcctggaaagaagagaccagtagagcagtcaccccaagaaccagactcctcctcgggcatcggcaggaaaggccaacagcccgccagaaaaagactcaattttggccagactggcgactcagagtcagttccagaccctcaacctctcggagaacctccagcagcgccctctggtgtgggacctaatacaatggcttcaggcggtggcgctccaatggcagacaataacgaaggcgccgacggagtgggtaatgcctcaggaaattggcattgcgattccacatggctgggcgacagagtcatcaccaccagcacccgcacctgggccttgcccacctacaataaccacctctacaagcaaatctccagtgcttcaacgggggccagcaacgacaaccactacttcggctacagcaccccctgggggtattttgatttcaacagattccactgccacttttcaccacgtgactggcagcgactcatcaacaacaattggggattccggcccaagagactcaacttcaaactcttcaacatccaggtcaaggaggtcacgcagaatgaaggcactaagaccatcgccaataaccttaccagcacgattcaggtatttacggactcggaataccagctgccgtacgtcctcggctccgcgcaccagggctgcctgcctccgttcccggcggacgtcttcatgattccccagtacggctaccttacactgaacaatggaagtcaagccgtaggccgttcctccttctactgcctggaatattttccatctcaaatgctgcgaactggcaacaacttccagtttacctacaccttcgaggacgtgcctttccacagcagctacgcccacagccagagcttggaccggctgatgaatcctctgattgaccagtacctgtactacttgtctcggactcagtccacaggaggaactcaaggtacccagcaattgttattttctcaagctgggcctgcaaacatgtcggctcaggctaagaactggctacctggaccttgctaccggcagcagcgagtctctacgacactgtcgcaaaacaacaacagcaactttgcttggactggtgccaccaaatatcacctgaacggaagagactctttggtaaatcccggtgtcgccatggcaacccacaaggacgacgaggaacgcttcttcccgtcgagtggagtcctgatgtttggaaaacagggtgctggaagagacaatgtggactacagcagcgttatgctaaccagcgaagaagaaattaaaaccactaaccctgtagccacagaacaatacggtgtggtggttgataacttgcagcaaaccaatacggggcctattgtgggaaatgtcaacagccaaggagccttacctggtatggtctggcagaaccgggacgtgtacctgcagggtcccatctgggccaagattcctcacacggacggcaacttccacccgtctccgctgatgggcggctttggcctgaaacatcctccgcctcagatcctcatcaaaaacacacctgtacctgcggatcctccaacggccttcaacaaggacaagctgaactctttcatcacccagtattctactggccaagtcagcgtggagatcgagtgggagctgcagaaggaaaacagcaagcgctggaacccggagatccagtacacttccaactattacaagtctaataatgttgaatttgctgttaatactgaaggtgtatatagtgaaccccgccccattggcaccagatacctgactcgtaatctgtaa

SEQ ID NO: 990 - protein, 735 aa, Artificial Sequence
  Description of Artificial Sequence: Synthetic polypeptide
MAADGYLPDWLEDNLSEGIREWWDLKPGAPKPKANQQKQDDGRGLVLPGYKYLGPFNGLDKGEPVNAADAAALEHDKAYDRQLDSGDNPYLKYNHADAEFQERLKEDTSFGGNLGRAVFQAKKRVLEPFGLVEEGAKTAPGKKRPVEQSPQEPDSSSGIGKTGQQPAKKRLNFGQTGDSESVPDPQPLGEPPATPAAVGPTTMASGGGAPVADNNEGADGVGSSSGNWHCDSTWLGDRVITTSTRTWALPTYNNHLYKQISSASTGASNDNHYFGYSTPWGYFDFNRFHCHFSPRDWQRLINNNWGFRPKRLNFKLFNIQVKEVTTNEGTKTIANNLTSTVQVFTDSEYQLPYVLGSAHQGCLPPFPADVFMVPQYGYLTLNNGSQALGRSSFYCLEYFPSQMLRTGNNFTFSYTFEDVPFHSSYAHSQSLDRLMNPLIDQYLYYLVRTQTTGTGGTQTLAFSQAGPSSMANQARNWVPGPCYRQQRVSTTTNQNNNSNFAWTGAAKFKLNGRDSLMNPGVAMASHKDDDDRFFPSSGVLIFGKQGAGNDGVDYSQVLITDEEEIKATNPVATEEYGAVAINNQAANTQAQTGLVHNQGVIPGMVWQNRDVYLQGPIWAKIPHTDGNFHPSPLMGGFGLKHPPPQILIKNTPVPADPPLTFNQAKLNSFITQYSTGQVSVEIEWELQKENSKRWNPEIQYTSNYYKSTNVDFAVNTEGVYSEPRPIGTRYLTRNL

SEQ ID NO: 991 - protein, 736 aa, Artificial Sequence
  Description of Artificial Sequence: Synthetic polypeptide
  MOD_RES (113)..(113): Any naturally occurring amino acid
MAADGYLPDWLEDTLSEGIRQWWKLKPGPPPPKPAERHKDDSRGLVLPGYKYLGPFNGLDKGEPVNAADAATLEHDKAYDQQLKAGDNPYLRYNHADAEFQERLQEDTSFGGXLGRAVFQAKKRVLEPLGLVEEAAKTAPGKKRPVEPSPQRSPDSSTGIGKKGQQPARKRLNFGQTGDSESVPDPQPLGEPPAAPSGVGPNTMAAGGGAPMADNNEGADGVGSSSGNWHCDSTWLGDRVITTSTRTWALPTYNNHLYKQISSASTGASNDNHYFGYSTPWGYFDFNRFHCHFSPRDWQRLINNNWGFRPKRLNFKLFNIQVKEVTTNDGVTTIANNLTSTVQVFSDSDYQLPYVLGSAHEGCLPPFPADVFMIPQYGYLTLNNGSQALGRSSFYCLEYFPSQMLRTGNNFQFSYTFEDVPFHSSYAHSQSLDRLMNPLIDQYLYYLVRTQTTGTGGTQTLAFSQAGPSSMANQARNWVPGPCYRQQRVSTTTNQNNNSNFAWTGAAKFKLNGRDSLMNPGVAMASHKDDDDRFFPSSGVLIFGKQGAGNDGVDYSQVLITDEEEIKATNPVATEEYGAVAINNQAANTQAQTGLVHNQGVIPGMVWQDRDVYLQGPIWAKIPHTDGHFHPSPLMGGFGLKHPPPQILIKNTPVPANPPAEFSATKFASFITQYSTGQVSVEIEWELQKENSKRWNPEVQYTSNYAKSANVDFTVDNNGLYTEPRPIGTRYLTRPL

SEQ ID NO: 992 - protein, 737 aa, Artificial Sequence
  Description of Artificial Sequence: Synthetic polypeptide
  MOD_RES (112)..(112): Any naturally occurring amino acid
MTDGYLPDWLEDNLSEGVREWWALQPGAPKPKANQQKQDDGRGLVLPGYKYLGPFNGLDKGEPVNAADAAALEHDKAYDQQLKAGDNPYLRYNHADAEFQERLQEDTSFGGXLGRAVFQAKKRVLEPLGLVEEGAKTAPGKKRPVEPSPQRSPDSSTGIGKKGQQPARKRLNFGQTGDSESVPDPQPLGEPPAAPSGVGSLTMASGGGAPVADNNEGADGVGSSSGNWHCDSQWLGDRVITTSTRTWALPTYNNHLYKQISNSTSGGSSNDNAYFGYSTPWGYFDFNRFHCHFSPRDWQRLINNNWGFRPKRLSFKLFNIQVKEVTQNEGTKTIANNLTSTIQVFTDSEYQLPYVLGSAHQGCLPPFPADVFMIPQYGYLTLNNGSQAVGRSSFYCLEYFPSQMLRTGNNFQFTYTFEDVPFHSSYAHSQSLDRLMNPLIDQYLYYLSRTQTTGGTANTQTLGFSQGGPNTMANQAKNWLPGPCYRQQRVSTTTGQNNNSNFAWTAGTKYHLNGRNSLANPGIAMATHKDDEERFFPSNGILIFGKQNAARDNADYSDVMLTSEEEIKTTNPVATEEYGIVADNLQQQNTAPQIGTVNSQGALPGMVWQNRDVYLQGPIWAKIPHTDGNFHPSPLMGGFGLKHPPPQILIKNTPVPADPPTTLNQAKLNSFITQYSTGQVSVEIEWELQKENSKRWNPEIQYTSNYYKSTNVDFAVNTEGTYSEPRPIGTRFLTRNL

SEQ ID NO: 993 - protein, 736 aa, Artificial Sequence
  Description of Artificial Sequence: Synthetic polypeptide
  MOD_RES (113)..(113): Any naturally occurring amino acid
MAADGYLPDWLEDTLSEGIRQWWKLKPGPPPPKPAERHKDDSRGLVLPGYKYLGPFNGLDKGEPVNAADAAALEHDKAYDQQLEAGDNPYLRYNHADAEFQERLQEDTSFGGXLGRAVFQAKKRVLEPLGLVEEGAKTAPGKKRPVEQSPQEPDSSSGIGRKGQQPARKRLNFGQTGDSESVPDPQPLGEPPAAPSGVGPNTMASGGGAPMADNNEGADGVGNASGNWHCDSTWLGDRVITTSTRTWALPTYNNHLYKQISSASTGASNDNHYFGYSTPWGYFDFNRFHCHFSPRDWQRLINNNWGFRPKRLNFKLFNIQVKEVTQNEGTKTIANNLTSTIQVFTDSEYQLPYVLGSAHQGCLPPFPADVFMIPQYGYLTLNNGSQAVGRSSFYCLEYFPSQMLRTGNNFQFTYTFEDVPFHSSYAHSQSLDRLMNPLIDQYLYYLSRTQSTGGTQGTQQLLFSQAGPANMSAQAKNWLPGPCYRQQRVSTTLSQNNNSNFAWTGATKYHLNGRDSLVNPGVAMATHKDDEERFFPSSGVLMFGKQGAGRDNVDYSSVMLTSEEEIKTTNPVATEQYGVVVDNLQQTNTGPIVGNVNSQGALPGMVWQNRDVYLQGPIWAKIPHTDGNFHPSPLMGGFGLKHPPPQILIKNTPVPADPPTAFNKDKLNSFITQYSTGQVSVEIEWELQKENSKRWNPEIQYTSNYYKSNNVEFAVNTEGVYSEPRPIGTRYLTRNL

SEQ ID NO: 994 - DNA, 2211 bp, Artificial Sequence
  Description of Artificial Sequence: Synthetic polynucleotide
atggccgccgacggctacctgcccgactggctggaggacaacctgagcgagggcatccgcgagtggtgggccctgaagcccggcgccccccagcccaaggccaaccagcagcaccaggacaacgcccgcggcctggtgctgcccggctacaagtacctgggccccggcaacggcctggacaagggcgagcccgtgaacgccgccgacgccgccgccctggagcacgacaaggcctacgaccagcagctgaaggccggcgacaacccctacctgaagtacaaccacgccgacgccgagttccaggagcgcctgaaggaggacaccagcttcggcggcaacctgggccgcgccgtgttccaggccaagaagcgcctgctggagcccctgggcctggtggaggaggccgccaagaccgcccccggcaagaagcgccccgtggagcagagcccccaggagcccgacagcagcgccggcatcggcaagagcggcgcccagcccgccaagaagcgcctgaacttcggccagaccggcgacaccgagagcgtgcccgacccccagcccatcggcgagccccccgccgcccccagcggcgtgggcagcctgaccatggccagcggcggcggcgcccccgtggccgacaacaacgagggcgccgacggcgtgggcagcagcagcggcaactggcactgcgacagccagtggctgggcgaccgcgtgatcaccaccagcacccgcacctgggccctgcccacctacaacaaccacctgtacaagcagatcagcaacagcaccagcggcggcagcagcaacgacaacgcctacttcggctacagcaccccctggggctacttcgacttcaaccgcttccactgccacttcagcccccgcgactggcagcgcctgatcaacaacaactggggcttccgccccaagcgcctgaacttcaagctgttcaacatccaggtgaaggaggtgaccgacaacaacggcgtgaagaccatcgccaacaacctgaccagcaccgtgcaggtgttcaccgacagcgactaccagctgccctacgtgctgggcagcgcccacgagggctgcctgccccccttccccgccgacgtgttcatgatcccccagtacggctacctgaccctgaacgacggcagccaggccgtgggccgcagcagcttctactgcctggagtacttccccagccagatgctgcgcaccggcaacaacttccagttcagctacgagttcgagaacgtgcccttccacagcagctacgcccacagccagagcctggaccgcctgatgaaccccctgatcgaccagtacctgtactacctgagcaagaccatcaacggcagcggccagaaccagcagaccctgaagttcagcgtggccggccccagcaacatggccgtgcagggccgcaactacatccccggccccagctaccgccagcagcgcgtgagcaccaccgtgacccagaacaacaacagcgagttcgcctggcccggcgccagcagctgggccctgaacggccgcaacagcctgatgaaccccggccccgccatggccagccacaaggagggcgaggaccgcttcttccccctgagcggcagcctgatcttcggcaagcagggcaccggccgcgacaacgtggacgccgacaaggtgatgatcaccaacgaggaggagatcaagaccaccaaccccgtggccaccgagagctacggccaggtggccaccaaccaccagagcgcccaggcccaggcccagaccggctgggtgcagaaccagggcatcctgcccggcatggtgtggcaggaccgcgacgtgtacctgcagggccccatctgggccaagatcccccacaccgacggcaacttccaccccagccccctgatgggcggcttcggcatgaagcacccccccccccagatcctgatcaagaacacccccgtgcccgccgacccccccaccgccttcaacaaggacaagctgaacagcttcatcacccagtacagcaccggccaggtgagcgtggagatcgagtgggagctgcagaaggagaacagcaagcgctggaaccccgagatccagtacaccagcaactactacaagagcaacaacgtggagttcgccgtgaacaccgagggcgtgtacagcgagccccgccccatcggcacccgctacctgacccgcaacctgtaa

SEQ ID NO: 995 - DNA, 2211 bp, Artificial Sequence
  Description of Artificial Sequence: Synthetic polynucleotide
atggctgccgatggttatcttccagattggctcgaggacactctctctgaaggaataagacagtggtggaagctcaaacctggcccaccaccaccaaagcccgcagagcggcataaggacgacagcaggggtcttgtgcttcctgggtacaagtacctcggacccttcaacggactcgacaagggagagccggtcaacgaggcagacgccgcggccctcgagcacgacaaggcctacgaccagcagctcaaggccggagacaacccgtacctcaagtacaaccacgccgacgccgagttccaggagcggctcaaagaagatacgtcttttgggggcaacctcggacgagcagtcttccaggccaagaagcgggttctcgaacctctcggtctggttgaggaaggcgctaagacggctcctggaaagaaacgtccggtagagcagtcgccacaagagccagactcctcctcgggcattggcaagacaggccagcagcccgctaaaaagagactcaattttggtcagactggcgactcagagtcagtccccgacccacaacctctcggagaacctccagcaacccccgctgctgtgggacctactacaatggcttcaggcggtggcgcaccaatggcggacaataacgaaggcgccgatggagtgggtagttcctcgggaaattggcattgcgattcccaatggctgggggacagagtcatcaccaccagcacccgaacatgggccttgcccacctataacaaccacctctacaagcaaatctccagtgcttcaacgggggccagcaacgacaaccactacttcggctacagcaccccctgggggtattttgacttcaacagattccactgccacttctcaccacgtgactggcagcgactcatcaacaacaactggggattccgacccaagagactcaacttcaagctctttaacattcaagtcaaggaggtcacgcagaatgaaggcaccaagaccatcgccaataacctcaccagcaccatccaggtgtttacggactcggagtaccagctgccgtacgttctcggctccgcccaccagggctgcctgcctccgttcccggcggacgtgttcatgattccccagtacggctacctaacactcaacaacggtagtcaggccgtgggacgctcctccttctactgcctggaatactttccttcgcagatgctgagaaccggcaacaacttccagtttacttacaccttcgaggacgtgcctttccacagcagctacgcccacagccagagcttggaccggctgatgaatcctctgattgaccagtacctgtactacttgtctcggactcaaacaacaggaggcacggcaaatacgcagactctgggcttcagccaaggtgggcctaatacaatggccaatcaggcaaagaactggctgccaggaccctgttaccgccaacaacgcgtctcaacgacaaccgggcaaaacaacaatagcaactttgcctggactgctgggaccaaataccatctgaatggaagaaattcattggctaatcctggcatcgctatggcaacacacaaagacgacaaggagcgtttttttcccagtaacgggatcctgatttttggcaaacaaaatgctgccagagacaatgcggattacagcgatgtcatgctcaccagcgaggaagaaatcaaaaccactaaccctgtggctacagaggaatacggtatcgtggcagataacttgcagcagcaaaacacggctcctcaaattggaactgtcaacagccagggggccttacccggtatggtctggcagaaccgggacgtgtacctgcagggtcccatctgggccaagattcctcacacggacggcaacttccacccgtctccgctgatgggcggctttggcctgaaacatcctccgcctcagatcctgatcaagaacacgcctgtacctgcggatcctccgaccaccttcaaccagtcaaagctgaactctttcatcacgcaatacagcaccggacaggtcagcgtggaaattgaatgggagctgcagaaagaaaacagcaaacgctggaacccagagattcaatacacttccaactactacaaatctacaagtgtggactttgctgttaatacagaaggcgtgtactctgaaccccaccccattggcacccgttacctcacccgtcccctgtaa

SEQ ID NO: 996 - DNA, 2211 bp, Artificial Sequence
  Description of Artificial Sequence: Synthetic polynucleotide
atggctgccgatggttatcttccagattggctcgaggacaacctctctgagggcattcgcgagtggtgggcgctgaaacctggagccccgaagcccaaagccaaccagcaaaagcaggacgacggccggggtctggtgcttcctggctacaagtacctcggacccttcaacggactcgacaagggggagccggtcaacgcagcagacgcggcggccctcgagcacgacaaggcctacgaccagcagctcaaggccggagacaacccgtacctcaagtacaaccacgccgacgccgagttccaggagcggctcaaagaagatacgtcttttgggggcaacctcgggcgagcagtcttccaggccaaaaagaggcttcttgaacctcttggtctggttgaggaagcggctaagacggctcctggaaagaagaggcctgtagagcagtctcctcaggaaccggactcctccgcgggtattggcaaatcgggtgcacagcccgctaaaaagagactcaattttggtcagactggcgactcagagtcagtccccgacccacaacctctcggagaacctccagcaacccccgctgctgtgggacctactacaatggcttcaggcggtggcgcaccaatggcagacaataacgaaggcgccgacggagtgggtaatgcctcaggaaattggcattgcgattccacatggctgggcgacagagtcatcaccaccagcacccgaacctgggccctgcccacctacaataaccacctctacaagcaaatctccagtgcttcaacgggggccagcaacgacaaccactacttcggctacagcaccccctgggggtattttgatttcaacagattccactgccacttttcaccacgtgactggcagcgactcatcaacaacaattggggattccggcccaagagactcaacttcaaactcttcaacatccaagtcaaggaggtcacgcagaatgaaggcaccaagaccatcgccaataacctcaccagcaccatccaggtgtttacggactcggagtaccagctgccgtacgttctcggctctgcccaccagggctgcctgcctccgttcccggcggacgtgttcatgattccccagtacggctacctaacactcaacaacggtagtcaggccgtgggacgctcctccttctactgcctggaatactttccttcgcagatgctgagaaccggcaacaacttccagtttacttacaccttcgaggacgtgcctttccacagcagctacgcccacagccagagcttggaccggctgatgaatcctctgattgaccagtacctgtactacttgtctcggactcaaacaacaggaggcacggcaaatacgcagactctgggcttcagccaaggtgggcctaatacaatggccaatcaggcaaagaactggctgccaggaccctgttaccgccaacaacgcgtctcaacgacaaccgggcaaaacaacaatagcaactttgcctggactgctgggaccaaataccatctgaatggaagaaattcattggctaatcctggcatcgctatggcaacacacaaagacgacaaggagcgtttttttcccagtaacgggatcctgatttttggcaaacaaaatgctgccagagacaatgcggattacagcgatgtcatgctcaccagcgaggaagaaatcaaagccactaaccctgtggctacagaggaatacggtatcgtggcagataacttgcagcagcaaaacacggctcctcaaattggaactgtcaacagccagggggccttacccggtatggtttggcagaaccgggacgtgtacctgcagggtcccatctgggccaagattcctcacacggacggcaacttccacccgtctccgctgatgggcggctttggcctgaaacatcctccgcctcagatcctgatcaagaacacgcctgtacctgcggatcctccgaccaccttcaaccagtcaaagctgaactctttcatcacgcaatacagcaccggacaggtcagcgtggaaattgaatgggagctgcagaaggaaaacagcaagcgctggaaccccgagatccagtacacctccaactactacaaatctacaagtgtggactttgctgttaatacagaaggcgtgtactctgaaccccaccccattggcacccgttacctcacccgtcccctgtaa

SEQ ID NO: 997 - DNA, 2214 bp, Artificial Sequence
  Description of Artificial Sequence: Synthetic polynucleotide
atggctgccgatggttatcttccagattggctcgaggacaacctctctgagggcattcgcgagtggtgggacttgaaacctggagccccgaagcccaaagccaaccagcaaaagcaggacgacggccggggtctggtgcttcctggctacaagtacctcggacccttcaacggactcgacaagggggagcccgtcaacgcggcggacgcagcggccctcgagcacgacaaggcctacgaccagcagctcaaagcgggtgacaatccgtacctgcggtataaccacgccgacgccgagtttcaggagcgtctgcaagaagatacgtcttttgggggcaacctcgggcgagcagtcttccaggccaagaagcgggttctcgaacctctcggtctggttgaggaaggcgctaatacggctcctggaaagaaacgtccggtagagcagtcgccacaagagccagactcctccgcgggtattggcaaatcgggtgcacagcccgctaaaaagagactcaatttcggtcagactggcgacacagagtcagtcccagaccctcaaccaatcggagaacctcccgcagccccctcaggtgtgggatctcttacaatggcttcaggtggtggcgcaccagtggcagacaataacgaaggtgccgatggagtgggtagttcctcgggaaattggcattgcgattcccaatggctgggggacagagtcatcaccaccagcacccgaacctgggccctgcccacctacaacaatcacctctacaagcaaatctccaacagcacatctggaggatcttcaaatgacaacgcctacttcggctacagcaccccctgggggtattttgacttcaacagattccactgccacttctcaccacgtgactggcagcgactcatcaacaacaactggggattccggcctaagcgactcaacttcaagctcttcaacattcaggtcaaagaggttacggacaacaatggagtcaagaccatcgccaataacctcaccagcaccatccaggtgtttacggactcggagtaccagctgccgtacgttctcggctccgcccaccagggctgcctgcctccgttcccggcggacgtgttcatgattccccagtacggctacctaacactcaacaacggtagtcaggccgtgggacgctcctccttctactgcctggaatactttccttcgcagatgctgagaaccggcaacaacttccagtttacttacaccttcgaggacgtgcctttccacagcagctacgcccacagccagagcttggaccggctgatgaatcctctgattgaccagtacctgtactacttgtctcggactcaaacaacaggaggcacggcaaatacgcagactctgggcttcagccaaggtgggcctaatacaatggccaatcaggcaaagaactggctgccaggaccctgttaccgccaacaacgcgtctcaacgacaaccgggcaaaacaacaatagcaactttgcctggactgctgggaccaaataccatctgaatggaagaaattcattggctaatcctggcatcgctatggcctcacacaaagacgacaaggagcgtttttttcccagtaacgggatcctgatttttggcaaacaaaatgctgccagagacaatgcggattacagcgatgtcatgctcaccagcgaggaagaaatcaaaaccactaaccctgtggctacagaggaatacggtatcgtggcagataacttgcagcagcaaaacacggctcctcaaattggaactgtcaacagtcaaggagccttacctggcatggtctggcagaaccgggacgtgtacctgcagggtcccatctgggccaagattcctcacacggacggcaacttccacccgtctccgctgatgggcggctttggcctgaaacatcctccgcctcagatcctgatcaagaacacgcctgtacctgcggatcctccgaccaccttcaaccagtcaaagctgaactctttcatcacgcaatacagcaccggacaggtcagcgtggaaattgaatgggagctgcagaaggaaaacagcaagcgctggaaccccgagatccagtacaccaccaactactacaaatctacaagtgtggactttgctgttaatacagaaggcgtgtactctgaaccccaccccattggcacccgttacctcacccgtcccctgtaa

SEQ ID NO: 998 - DNA, 2211 bp, Artificial Sequence
  Description of Artificial Sequence: Synthetic polynucleotide
atggctgccgatggttatcttccagattggctcgaggacaacctctctgagggcattcgcgagtggtgggcgctgaaacctggagccccgaagcccaaagccaaccagcaaaagcaggacgacggccggggtctggtgcttcctggctacaagtacctcggacccttcaacggactcgacaaaggagagccggtcaacgaggcggacgcggcagccctcgaacacgacaaagcttacgaccagcagctcaaggccggtgacaatccgtacctgcggtataaccacgccgacgccgagtttcaggagcgtcttcaagaagatacgtcttttgggggcaacctcgggcgagcagtcttccaggccaagaagcgggttctcgaacctctcggtctggttgaggaaggcgctaagacggctcctggaaagaaacgtccggtagagcagtcgccacaagagccagactcctcctcgggcatcggcaagacaggccagcagcccgctaaaaagagactcaattttggtcagactggcgactcagagtcagtccccgacccacaacctctcggagaacctccagcaacccccgctgctgtgggacctactacaatggcttcaggcggtggcgcaccaatggcagacaataacgaaggcgccgacggagtgggtaatgcctcaggaaattggcattgcgattccacatggctgggcgacagagtcatcaccaccagcacccgcacctgggccttgcccacctacaataaccacctctacaagcaaatctccagtgcttcaacgggggccagcaacgacaaccactacttcggctacagcaccccctgggggtattttgactttaacagattccactgccacttttcaccacgtgactggcaaagactcatcaacaacaactggggattccggcccaagagactcaacttcaagctcttcaacatccaggtcaaggaggtcacgcagaatgaaggcaccaagaccatcgccaataaccttaccagcacgattcaggtctttacggactcggaataccagctcccgtacgtcctcggctctgcgcaccagggctgcctccctccgttcccggcggacgtgttcatgattccgcagtacggctacctaacactcaacaacggtagtcaggccgtgggacgctcctccttctactgcctggaatactttccttcgcagatgctgagaaccggcaacaacttccagtttacttacaccttcgaggacgtgcctttccacagcagctacgcccacagccagagcttggaccggctgatgaatcctctgattgaccagtacctgtactacttgtctcggactcaaacaacaggaggcacggcaaatacgcagactctgggcttcagccaaggtgggcctaatacaatggccaatcaggcaaagaactggctgccaggaccctgttaccgccaacaacgcgtctcaacgacaaccgggcaaaacaacaatagcaactttgcctggactgctgggaccaaataccatctgaatggaagaaattcattggctaatcctggcatcgctatggcaacacacaaagacgacaaggagcgtttttttcccagtaacgggatcctgatttttggcaaacaaaatgctgccagagacaatgcggattacagcgatgtcatgctcaccagcgaggaagaaatcaaaaccactaaccctgtggctacagaggaatacggtatcgtggcagataacttgcagcagcaaaacacggctcctcaaattggaactgtcaacagccagggggccttacccggtatggtctggcagaaccgggacgtgtacctgcagggtcccatctgggccaagattcctcacacggacggcaacttccacccgtctccgctgatgggcggctttggcctgaaacatcctccgcctcagatcctgatcaagaacacgcctgtacctgcggatcctccgaccaccttcaaccagtcaaagctgaactctttcatcacgcaatacagcaccggacaggtcagcgtggaaattgaatgggagctgcagaaggaaaacagcaagcgctggaaccccgagatccagtacacctccaactactacaaatctacaagtgtggactttgctgttaatacagaaggcgtgtactctgaaccccaccccattggcacccgttacctcacccgtcccctgtaa

SEQ ID NO: 999 - DNA, 2211 bp, Artificial Sequence
  Description of Artificial Sequence: Synthetic polynucleotide
atggctgccgatggttatcttccagattggctcgaggacaacctctctgagggcattcgcgagtggtgggcgctgaaacctggagccccgaagcccaaagccaaccagcaaaagcaggacgacggccggggtctggtgcttcctggctacaagtacctcggacccttcaacggactcgacaaaggagagccggtcaacgaggcggacgcggcagccctcgaacacgacaaagcttacgaccagcagctcaaagcgggtgacaatccgtacctgcggtataaccacgccgacgccgagtttcaggagcgtctgcaagaagatacgtcttttgggggcaacctcgggcgagcagtcttccaggccaagaagagggttctcgaaccttttggtctggttgaggaaggtgctaagacggctcctggaaagaaacgtccggtagagcagtcgccacaagagccagactcctcctcgggcattggcaagacaggccagcagcccgctaaaaagagactcaattttggtcagactggcgactcagagtcagtccccgacccacaacctctcggagaacctccagcaacccccgctgctgtgggacctactacaatggcttcaggcggtggcgcaccaatggcagacaataacgaaggcgccgacggagtgggtaatgcctcaggaaattggcattgcgattcccaatggctgggcgacagagtcatcaccaccagcaccagaacctgggccttgcccacctataacaaccacctctacaagcaaatctccagtgcttcaacgggggccagcaacgacaaccactacttcggctacagcaccccctgggggtattttgatttcaacagattccactgccacttctcaccacgtgactggcagcgactcatcaacaacaactggggattccggcctaagcgactcaacttcaagctcttcaacattcaggtcaaagaggttacggacaacaatggagtcaagaccatcgccaataaccttaccagcacggttcaagtcttctcggactcggagtaccagttgccgtacgtcctcggctctgcgcaccagggctgcctccctccgttcccggcggacgtgttcatgattccccagtacggctacctaacactcaacaacggtagtcaggccgtgggacgctcctccttctactgcctggaatactttccttcgcagatgctgagaaccggcaacaacttccagtttacttacaccttcgaggacgtgcctttccacagcagctacgcgcacagccagagcttggaccggctgatgaatcctctgattgaccagtacctgtactacttgtctcggactcaaacaacaggaggcacggcaaatacgcagactctgggcttcagccaaggtgggcctaatacaatggccaatcaggcaaagaactggctgccaggaccctgttaccgccaacaacgcgtctcaacgacaaccgggcaaaacaacaatagcaactttgcctggactgctgggaccaaataccatctgaatggaagaaattcattggctaatcctggcatcgctatggcaacacacaaagacgacaaggagcgtttttttcccagtaacgggatcctgatttttggcaaacaaaatgctgccagagacaatgcggattacagcgatgtcatgctcaccagcgaggaagaaatcaaaaccactaaccctgtggctacagaggaatacggtatcgtggcagataacttgcagcagcaaaacacggctcctcaaattggaactgtcaacagccagggggccttacccggtatggtctggcagaaccgggacgtgtacctgcagggtcccatctgggccaagattcctcacacggacggcaacttccacccgtctccgctgatgggcggctttggcctgaaacatcctccgcctcagatcctgatcaagaacacgcctgtacctgcggatcctccgaccaccttcaaccagtcaaagctgaactctttcatcacgcaatacagcaccggacaggtcagcgtggaaattgaatgggagctgcagaaggaaaacagcaagcgctggaaccccgagatccagtacacctccaactactacaaatctacaagtgtggactttgctgttaatacagaaggcgtgtactctgaaccccaccccattggcacccgttacctcacccgtcccctgtaa

SEQ ID NO: 1000 - DNA, 2244 bp, Artificial Sequence
  Description of Artificial Sequence: Synthetic polynucleotide
  modified_base (2241)..(2241): a, c, g, or t
atggctgccgatggttatcttccagattggctcgaggacactctctctgaaggaataagacagtggtggaagctcaaacctggcccaccaccaccaaagcccgcagagcggcataaggacgacagcaggggtcttgtgcttcctgggtacaagtacctcggacccttcaacggactcgacaagggagagccggtcaacgaggcagacgccgcggccctcgagcacgacaaagcctacgaccggcagctcgacagcggagacaacccgtacctcaagtacaaccacgccgacgcggagtttcaggagcgccttaaagaagatacgtcttttgggggcaacctcgggcgagcagtcttccaggccaagaagagggttctcgaaccttttggtctggttgaggaaggtgctaagacggctcctggaaagaaacgtccggtagagcagtcgccacaagagccagactcctcctcgggcattggcaagacaggccagcagcccgctaaaaagagactcaattttggtcagactggcgactcagagtcagtccccgacccacaacctctcggagaacctccagcaacccccgctgctgtgggacctactacaatggcttcaggcggtggcgcaccaatggcagacaataacgaaggcgccgacggagtgggtaatgcctcaggaaattggcattgcgattccacatggctgggcgacagagtcatcaccaccagcacccgaacatgggccttgcccacctataacaaccacctctacaagcaaatctccagtgcttcaacgggggccagcaacgacaaccactacttcggctacagcaccccctgggggtattttgacttcaacagattccactgccacttctcaccacgtgactggcagcgactcatcaacaacaactggggattccggcctaagcgactcaacttcaagctcttcaacattcaggtcaaagaggttacggacaacaatggagtcaagaccatcgccaataaccttaccagcacggtccaggtcttcacggactcagactatcagctcccgtacgtgctcgggtcggctcacgagggctgcctcccgccgttcccagcggacgttttcatgattcctcagtacggctacctaacactcaacaacggtagtcaggccgtgggacgctcctccttctactgcctggaatactttccttcgcagatgctgagaaccggcaacaacttccagtttacttacaccttcgaggacgtgcctttccacagcagctacgcgcacagccagagcttggaccggctgatgaatcctctgattgaccagtacctgtactacttgtctcggactcaaacaacaggaggcacggcaaatacgcagactctgggcttcagccaaggtgggcctaatacaatggccaatcaggcaaagaactggctgccaggaccctgttaccgccaacaacgcgtctcaacgacaaccgggcaaaacaacaatagcaactttgcctggactgctgggaccaaataccatctgaatggaagaaattcattggctaatcctggcatcgctatggcaacacacaaagacgacaaggagcgtttttttcccagtaacgggatcctgatttttggcaaacaaaatgctgccagagacaatgcggattacagcgatgtcatgctcaccagcgaggaagaaatcaaaaccactaaccctgtggctacagaggaatacggtatcgtggcagataacttgcagcagcaaaacacggctcctcaaattggaactgtcaacagccagggggccttacccggtatggtctggcagaaccgggacgtgtacctgcagggtcccatctgggccaagattcctcacacggacggcaacttccacccgtctccgctgatgggcggctttggcctgaaacatcctccgcctcagatcctgatcaagaacacgcctgtacctgcggatcctccgaccaccttcaaccagtcaaagctgaactctttcatcacgcaatacagcaccggacaggtcagcgtggaaattgaatgggagctgcagaaggaaaacagcaagcgctggaaccccgagatccagtacacctccaactactacaaatctacaagtgtggactttgctgttaatacagaaggcgtgtactctgaaccccaccccattggcaccagatacctgactcgtaatctgtaattgcttgttaatcaataaaccgtttaattnttt

SEQ ID NO: 1001 - DNA, 2217 bp, Artificial Sequence
  Description of Artificial Sequence: Synthetic polynucleotide
atggctgccgatggttatcttccagattggctcgaggacaacctctctgagggcattcgcgagtggtgggacttgaaacctggagccccgaaacccaaagccaaccagcaaaagcaggacgacggccggggtctggtgcttcctggctacaagtacctcggacccttcaacggactcgacaagggggagcccgtcaacgcggcggacgcagcggccctcgagcacgacaaggcctacgaccagcagctccaagcgggtgacaatccgtacctgcggtataaccacgccgacgccgagtttcaggagcgtctgcaagaagatacgtcttttgggggcaacctcggacgagcagtcttccaggcgaaaaagagggttctcgaacctctcggtctggttgaggaaggcgctaagacggctcctggaaagaagagaccggtagagccatcaccccagcgttctccagactcctctacgggcatcggcaagaaaggccaacagcccgccagaaaaagactcaattttggtcagactggcgactcagagtcagttccagaccctcaacctctcggagaacctccagcagcgccctctggtgtgggacctaatacaatggctgcaggcggtggcgcaccaatggcagacaataacgaaggcgccgacggagtgggtagttcctcgggaaattggcattgcgattcccaatggctgggggacagagtcatcaccaccagcacccgaacctgggccctgcccacctacaacaatcacctctacaagcaaatctccaacagcacatctggaggatcttcaaatgacaacgcctacttcggctacagcaccccctgggggtattttgacttcaaccgcttccactgccacttctcaccacgtgactggcagcgactcatcaacaacaactggggattccggcccaagagactcagcttcaaactcttcaacatccaggtcaaggaggtcacgcagaatgaaggcaccaagaccatcgccaataacctcaccagcaccatccaggtgtttacggactcggagtaccagctgccgtacgttctcggctctgcccaccagggctgcctgcctccgttcccggcggacgtgttcatgattcctcagtacggctacctaacgctcaacaatggcagccaggcagtgggacggtcatccttttactgcctggaatatttcccatcgcagatgctgagaacgggcaacaactttaccttcagctacacctttgaggacgttcctttccacagcagctacgctcacagccagagtctggaccgtctcatgaatcctctgattgaccagtacctgtactacttgtctcggactcaaacaacaggaggcacggcaaatacgcagactctgggcttcagccaaggtgggcctaatacaatggccaatcaggcaaagaactggctgccaggaccctgttaccgccaacaacgcgtctcaacgacaaccgggcaaaacaacaatagcaactttgcctggactgctgggaccaaataccatctgaatggaagaaattcattggctaatcctggcatcgctatggcaacacacaaagacgacaaggagcgtttttttcccagtaacgggatcctgatttttggcaaacaaaatgctgccagagacaatgcggattacagcgatgtcatgctcaccagcgaggaagaaatcaaaaccactaaccctgtggctacagaggaatacggtatcgtggcagataacttgcagcagcaaaacacggctcctcaaattggaactgtcaacagccagggggccttacccggtatggtctggcagaaccgggacgtgtacctgcagggtcccatctgggccaagattcctcacacggacggcaacttccacccgtctccgctgatgggcggctttggacttaagcacccgcctcctcagatcctcatcaaaaacacgcctgttcctgcggatcctccgaccaccttcaaccagtcaaagctgaactctttcatcacgcaatacagcaccggacaggtcagcgtggaaattgaatgggagctgcagaaggaaaacagcaagcgctggaaccccgagatccagtacacctccaactactacaaatctacaagtgtggactttgctgttaatacagaaggcgtgtactctgaaccccaccccattggcacccgttacctcacccgtcccctgtaa

SEQ ID NO: 1002 - DNA, 2214 bp, Artificial Sequence
  Description of Artificial Sequence: Synthetic polynucleotide
atggctgccgatggttatcttccagattggctcgaggacaacctctctgagggcattcgcgagtggtgggacttgaaacctggagccccgaagcccaaagccaaccagcaaaagcaggacgacggccggggtctggtgcttcctggctacaagtacctcggacccttcaacggactcgacaagggggagcccgtcaacgcggcggatgcagcggccctcgagcacgacaaagcctacgaccagcagctcaaagcgggtgacaatccgtacctgcggtataaccacgccgacgccgagtttcaggagcgtctgcaagaagatacgtcttttgggggcaacctcgggcgagcagtcttccaggccaagaagagggttctcgaaccttttggtctggttgaggaaggtgctaagacggctcctggaaagaaacgtccggtagagcagtcgccacaagagccagactcctcctcgggcattggcaagacaggccagcagcccgctaaaaagagactcaattttggtcagactggcgactcagagtcagtccccgacccacaacctctcggagaacctccagcaacccccgctgctgtgggacctactacaatggcttcaggcggtggcgcacccatgcaagacaataacgaaggcgccgacggagtgggtagttcctcgggaaattggcattgcgattccacatggctgggcgacagagtcatcaccaccagcacccgaacctgggccctgcccacctacaacaaccacctctacaagcaaatctccaacgggacatcgggaggagccaccaacgacaacacctacttcggctacagcaccccctgggggtattttgactttaacagattccactgccacttttcaccacgtgactggcagcgactcatcaacaacaactggggattccggcccaagagactcaacttcaagctcttcaacatccaggtcaaggaggtcacgcagaatgaaggcaccaagaccatcgccaataaccttaccagcacgattcaggtctttacggattcggaataccagctcccgtacgtcctcggctctgcgcaccagggctgcctccctccgttcccggcggacgtgttcatgattccgcagtacggctacctaacgctcaacaatggtagccaggcagtgggacggtcatccttttactgcctggaatatttcccatcgcagatgctgagaacgggcaacaactttaccttcagctacacctttgaggacgttcctttccacagcagctacgctcacagccagagtctggaccgtctcatgaatcctctgattgaccagtacctgtactacttgtctcggactcaaacaacaggaggcacggcaaatacgcagactctgggcttcagccaaggtgggcctaatacaatggccaatcaggcaaagaactggctgccaggaccctgttaccgccaacaacgcgtctcaacgacaaccgggcaaaacaacaatagcaactttgcctggactgctgggaccaaataccatctgaatggaagaaattcattggctaatcctggcatcgctatggcaacacacaaagacgacaaggagcgtttttttcccagtaacgggatcctgatttttggcaaacaaaatgctgccagagacaatgcggattacagcgatgtcatgctcaccagcgaggaagaaatcaaaaccactaaccctgtggctacagaggaatacggtatcgtggcagataacttgcagcagcaaaacacggctcctcaaattggaactgtcaacagccagggggccttacccggtatggtctggcagaaccgggacgtgtacctgcagggtcccatctgggccaagattcctcacacggacggcaacttccacccgtctccgctgatgggcggctttggcctgaaacatcctccgcctcagatcctgatcaagaacacgcctgtacctgcggatcctccgaccaccttcaaccagtcaaagctgaactctttcatcacgcaatacagcaccggacaggtcagcgtggaaattgaatgggagctgcagaaggaaaacagcaagcgctggaaccccgagatccagtacacctccaactactacaaatctacaagtgtggactttgctgttaatacagaaggcgtgtactctgaaccccaccccattggcacccgttacctcacccgtcccctgtaa

SEQ ID NO: 1003 - DNA, 2211 bp, Artificial Sequence
  Description of Artificial Sequence: Synthetic polynucleotide
atggctgccgatggttatcttccagattggctcgaggacaacctctctgagggcattcgcgagtggtgggcgctgaaacctggagccccgaagcccaaagccaaccagcaaaagcaggacgacggccggggtctggtgcttcctggctacaagtacctcggacccttcaacggactcgacaagggggagcccgtcaacgcggcggacgcagcggccctcgagcacgacaaggcctacgaccagcagctcaaagcgggtgacaatccgtacctgcggtataaccacgccgacgccgagtttcaggagcgtctgcaagaagatacgtcttttgggggcaacctcgggcgagcagtcttccaggccaagaagcgggttctcgaacctctcggtctggttgaggaaggcgctaagacggctcctggaaagaaacgtccggtagagcagtcgccacaagagccagactcctcctcgggcatcggcaagacaggccagcagcccgctaaaaagagactcaattttggtcagactggcgactcagagtcagtccccgacccacaacctctcggagaacctccagcaacccccgctgctgtgggacctactacaatggcttcaggcggtggcgcaccaatggcagacaataacgaaggcgccgacggagtgggtagttcctcgggaaattggcattgcgattccacatggctgggcgacagagtcatcaccaccagcacccgcacctgggccttgcccacctacaataaccacctctacaagcaaatctccagtgcttcaacgggggccagcaacgacaaccactacttcggctacagcaccccctgggggtattttgacttcaacagattccactgccacttctcaccacgtgactggcagcgactcatcaacaacaactggggattccggcctaagcgactcaacttcaagctcttcaacattcaggtcaaagaggttacggacaacaatggagtcaagaccatcgccaataaccttaccagcacggtccaggtcttcacggactcagactatcagctcccgtacgtgctcgggtcggctcacgagggctgcctcccgccgttcccagcggacgttttcatgattcctcagtacgggtatctgacgctcaacaatggcagccaggcagtgggacggtcatccttttactgcctggaatatttcccatcgcagatgctgagaacgggcaataactttaccttcagctacaccttcgaggacgtgcctttccacagcagctacgcgcacagccagagcctggaccggctgatgaatcctctgattgaccagtacctgtactacttgtctcggactcaaacaacaggaggcacggcaaatacgcagactctgggcttcagccaaggtgggcctaatacaatggccaatcaggcaaagaactggctgccaggaccctgttaccgccaacaacgcgtctcaacgacaaccgggcaaaacaacaatagcaactttgcctggactgctgggaccaaataccatctgaatggaagaaattcattggctaatcctggcatcgctatggcaacacacaaagacgacaaggagcgtttttttcccagtaacgggatcctgatttttggcaaacaaaatgctgccagagacaatgcggattacagcgatgtcatgctcaccagcgaggaagaaatcaaaaccactaaccctgtggctacagaggaatacggtatcgtggcagataacttgcagcagcaaaacacggctcctcaaattggaactgtcaacagccagggggccttacccggtatggtctggcagaaccgggacgtgtacctgcagggtcccatctgggccaagattcctcacacggacggcaacttccacccgtctccgctgatgggcggctttggcctgaaacatcctccgcctcagatcctgatcaagaacacgcctgtacctgcggatcctccgaccaccttcaaccagtcaaagctgaactctttcatcacgcaatacagcaccggacaggtcagcgtggaaattgaatgggagctgcagaaggaaaacagcaagcgctggaaccccgagatccagtacacctccaactactacaaatctacaagtgtggactttgctgttaatacagaaggcgtgtactctgaaccccaccccattggcacccgttacctcacccgtcccctgtaa

SEQ ID NO: 1004 - DNA, 2214 bp, Artificial Sequence
  Description of Artificial Sequence: Synthetic polynucleotide
atggctgccgatggttatcttccagattggctcgaggacaacctctctgagggcattcgcgagtggtgggacttgaaacctggagccccgaaacccaaagccaaccagcaaaagcaggacgacggccggggtctggtgcttcctggctacaagtacctcggacccttcaacggactcgacaagggggagcccgtcaacgcggcggatgcagcggccctcgagcacgacaaggcctacgaccagcagctcaaagcgggtgacaatccgtacctgcggtataaccacgccgacgccgagtttcaggagcgtctgcaagaagatacgtcttttgggggcaacctcgggcgagcagtcttccaggccaagaagcgggttctcgaacctctcggtctggttgaggaaggcgctaagacggctcctggaaagaagagaccggtagagccatcaccccagcgttctccagactcctctacgggcatcggcaagaaaggccaacagcccgccagaaaaagactcaattttggtcagactggcgactcagagtcagtccccgacccacaacctctcggagaacctccagcaacccccgctgctgtgggacctactacaatggcttcaggcggtggcgcaccaatggcagacaataacgaaggcgccgacggagtgggtaatgcctcaggaaattggcattgcgattccacatggctgggcgacagagtcatcaccaccagcacccgaacatgggccttgcccacctataacaaccacctctacaagcaaatctccagtgcttcaacgggggccagcaacgacaaccactacttcggctacagcaccccctgggggtattttgatttcaacagattccactgccatttctcaccacgtgactggcagcgactcatcaacaacaatttgggatcccggcccaagagactcaacttcaagctcttcatcatccaagtcaaggaggtcacgacgaatgatggcgtcacgaccatcgctaataaccttaccagcacggttcaagtcttctcggactcggagtaccagttgccgtacgtcctcggctctgcgcaccagggctgcctccctccgttcccggcggacgtgttcatgattccgcagtacggctacctaacgctcaacaatggcagccaggcagtgggacggtcatccttttactgcctggaatatttcccatcgcagatgctgagaacgggcaataactttaccttcagctacaccttcgaggacgtgcctttccacagcagctacgcgcacagccagagcctggaccggctgatgaatcctctcatcgaccagtacctgtattacctgaacagaactcagaatcagtccggaagtgcccaaaacaaggacttgctgtttagccgggggtctccagctggcatgtctgttcagcccaaaaactggctacctggaccctgttaccggcagcagcgcgtttctaaaacaaaaacagacaacaacaacagcaactttacctggactggtgcttcaaaatataaccttaatgggcgtgaatctataatcaaccctggcactgctatggcctcacacaaagacgacaaagacaagttctttcccatgagcggtgtcatgatttttggaaaggagagcgccggagcttcaaacactgcattggacaatgtcatgatcacagacgaagaggaaatcaaagccactaaccccgtggccaccgaaagatttgggactgtggcagtcaatctccagagcagcagcacagaccctgcgaccggagatgtgcatgttatgggagccttacctggaatggtgtggcaagacagagacgtatacctgcagggtcctatttgggccaaaattcctcacacggatggacactttcacccgtctcctctcatgggcggctttggacttaagcacccgcctcctcagatcctcatcaaaaacacgcctgttcctgcgaatcctccggcagagttttcggctacaaagtttgcttcattcatcacccagtattccacaggacaagtgagcgtggagattgaatgggagctgcagaaagaaaacagcaaacgctggaatcccgaagtgcagtatacatctaactatgcaaaatctgccaacgttgatttcactgtggacaacaatggactttatactgagcctcgccccattggcacccgttacctcacccgtcccctgtaa

SEQ ID NO: 1005 - DNA, 2211 bp, Artificial Sequence
  Description of Artificial Sequence: Synthetic polynucleotide
atggctgccgatggttatcttccagattggctcgaggacaacctctctgagggcattcgcgagtggtgggcgctgaaacctggagccccgaaacccaaagccaaccagcaaaagcaggacgacggccggggtctggtgcttcctggctacaagtacctcggacccttcaacggactcgacaagggggagcccgtcaacgcggcggacgcagcggccctcgagcacgacaaggcctacgaccagcagctcaaggcgggtgacaatccgtacctgcggtataaccacgccgacgccgagtttcaggagcgtctgcaagaagatacgtcttttgggggcaacctcgggcgagcagtcttccaggccaaaaagaggcttcttgaacctcttggtctggttgaggaagcggctaagacggctcctggaaagaaacgtccggtagagcagtcgccacaagagccagactcctcctcgggcattggcaagacaggccagcagcccgctaaaaagagactcaactttgggcagactggcgactcagagtcagtgcccgaccctcaaccaatcggagaacctccagcaacccccgctgctgtgggacctactacaatggcttcaggcggtggcgcaccaatggcggacaataacgaaggcgccgatggagtgggtaattcctcgggaaattggcattgcgattccacatggctgggcgacagagtcatcaccaccagcacccgaacctgggccctgcccacctacaacaatcacctctacaagcaaatctccagtgcttcaacgggggccagcaacgacaaccactacttcggctacagcaccccctgggggtattttgatttcaacagattccactgccacttttcaccacgtgactggcagcgactcatcaacaacaactggggattccggcccaagagactcaacttcaagctcttcaacatccaggtcaaggaggtcacgcagaatgaaggcaccaagaccatcgccaataacctcaccagcaccatccaggtgtttacggactcggagtaccagctgccgtacgttctcggctccgcccaccagggctgcctgcctccgttcccggcggacgtgttcatgattccgcagtacggctacctaacgctcaacaatggcagccaggcagtgggacggtcatccttttactgcctggaatatttcccatcgcagatgctgagaacgggcaacaactttaccttcagctacacctttgaggacgttcctttccacagcagctacgctcacagccagagtctggaccgtctcatgaatcctctgattgaccagtacctgtactacttgtctcggactcaaacaacaggaggcacggcaaatacgcagactctgggcttcagccaaggtgggcctaatacaatggccaatcaggcaaagaactggctgccaggaccctgttaccgccaacaacgcgtctcaacgacaaccgggcaaaacaacaatagcaactttgcctggactgctgggaccaaataccatctgaatggaagaaattcattggctaatcctggcatcgctatggcaacacacaaagacgacaaggagcgtttttttcccagtaacgggatcctgatttttggcaaacaaaatgctgccagagacaatgcggattacagcgatgtcatgctcaccagcgaggaagaaatcaaaaccactaaccctgtggctacagaggaatacggtatcgtggcagataacttgcagcagcaaaacacggctcctcaaattggaactgtcaacagccagggggccttacccggtatggtctggcagaaccgggacgtgtacctgcagggtcccatctgggccaagattcctcacacggacggcaacttccacccgtctccgctgatgggcggctttggcctgaaacatcctccgcctcagatcctgatcaagaacacgcctgtacctgcggatcctccgaccaccttcaaccagtcaaagctgaactctttcatcacgcaatacagcaccggacaggtcagcgtggaaattgaatgggagctgcagaaggaaaacagcaagcgctggaaccccgagatccagtacacctccaactactacaaatctacaagtgtggactttgctgttaatacagaaggcgtgtactctgatccccaccccattggcacccgttacctcacccgtcccctgtaa

SEQ ID NO: 1006 - DNA, 2211 bp, Artificial Sequence
  Description of Artificial Sequence: Synthetic polynucleotide
atggctgccgatggttatcttccagattggctcgaggacaacctctctgagggcattcgcgagtggtgggcgctgaaacctggagccccgaagcccaaagccaaccagcaagagcaggacgacggccggggtctggtgcttcctggctacaagtacctcggacccttcaacggactcgacaagggagagcccgtcaacgcggcggatgcagcggccctcgagcacgacaaagcctacgaccagcagctcaaagcgggtgacaatccgtacctgcggtataaccacgccgacgccgagtttcaggagcgtctgcaagaagatacgtcttttgggggcaacctcgggcgagcagtcttccaggccaagaagagggttctcgaaccttttggtctggttgaggaaggtgctaagacggctcctggaaagaaacgtccggtagagcagtcgccacaagagccagactcctcctcgggcattggcaagacaggccagcagcccgctaaaaagagactcaattttggtcagactggcgactcagagtcagttccagaccctcaacctctcggagaacctccagcagcgccctctggtgtgggacctaatacaatggctgcaggcggtggcgcaccaatggcagacaataacgaaggcgccgacggagtgggtagttcctcgggaaattggcattgcgattccacatggctgggcgacagagtcatcaccaccagcacccgaacctgggccctgcccacctacaacaaccacctctacaagcaaatctccagtgcttcaacgggggccagcaacgacaaccactacttcggctacagcaccccctgggggtattttgactttaacagattccactgccacttttcaccacgtgactggcagcgactcatcaacaacaactggggattccggcccaagagactcaacttcaagctcttcaacatccaggtcaaggaggtcacgcagaatgaaggcaccaagaccatcgccaataaccttaccagcacgattcaggtctttacggattcggaataccagctcccgtacgtcctcggctctgcgcaccagggctgcctccctccgttcccggcggacgtgttcatgattccgcagtacggctacctaacgctcaacaatggtagccaggcagtgggacggtcatcctttttctgcctggaatatttcccatcgcagatgctgagaacgggcaacaactttaccttcagctacacctttgaggacgttcctttccacagcagctacgctcacagccagagtctggaccgtctcatgaatcctctgattgaccagtacctgtactacttgtctcggactcaaacaacaggaggcacggcaaatacgcagactctgggcttcagccaaggtgggcctaatacaatggccaatcaggcaaagaactggctgccaggaccctgttaccgccaacaacgcgtctcaacgacaaccgggcaaaacaacaatagcaactttgcctggactgctgggaccaaataccatctgaatggaagaaattcattggctaatcctggcatcgctatggcaacacacaaagacgacaaggagcgtttttttcccagtaacgggatcctgatttttggcaaacaaaatgctgccagagacaatgcggattacagcgatgtcatgctcaccagcgaggaagaaatcaaaaccactaaccctgtggctacagaggaatacggtatcgtggcagataacttgcagcagcaaaacacggctcctcaaattggaactgtcaacagccagggggccttacccggtatggtctggcagaaccgagacgtgtacctgcagggtcccatctgggccaagattcctcacacggacggcaacttccacccgtctccgctgatgggcggctttggcctgaaacatcctccgcctcagatcctgatcaagaacacgcctgtacctgcggatcctccgaccaccttcaaccagtcaaagctgaactctttcatcacgcaatacagcaccggacaggtcagcgtggaaattgaatgggagctgcagaaggaaaacagcaagcgctggaaccccgagatccagtacacctccaactactacaaatctacaagtgtggactttgctgttaatacagaaggcgtgtactctgaaccccaccccattggcacccgttacctcacccgtcccctgtaa

SEQ ID NO: 1007 - DNA, 2211 bp, Artificial Sequence
  Description of Artificial Sequence: Synthetic polynucleotide
atggctgccgatggttatcttccagattggctcgaggacaacctctctgagggcattcgcgagtggtgggacttgaaacctggagccccgaagcccaaagccaaccagcaaaagcaggacgacggccggggtctggtgcttcctggctacaagtacctcggacccttcaacggactcgacaagggggagcccgtcaacgcggcggacgcagcggccctcgagcacgacaaggcctacgaccagcagctcaaagcgggtgacaatccgtacctgcggtataaccacgccgacgccgagtttcaggagcgtctgcaagaagatacgtcttttgggggcaacctcgggcgagcagtcttccaggccaagaagcgggttctcgaacctctcggtctggttgaggaaggcgctaagacggctcctggaaagaaacgtccggtagagcagtcaccacaagagccagactcctcctcgggcatcggcaagacaggccagcagcccgctaaaaagagactcaattttggtcagactggcgactcagagtcagtccccgacccacaacctctcggagaacctccagcaacccccgctgctgtgggacctactacaatggcttcaggcggtggcgcaccaatggcggacaataacgaaggcgccgacggagtgggtaatgcctcaggaaattggcattgcgattccacatggctgggcgacagagtcatcaccaccagcacccgaacatgggccttgcccacctataacaaccacctctacaagcaaatctccagtgcttcaacgggggccagcaacgacaaccactacttcggctacagcaccccctgggggtattttgatttcaacagattccactgccatttctcaccacgtgactggcagcgactcatcaacaacaattggggattccggcccaagagactcaacttcaagctcttcaacatccaagtcaaggaggtcacgacgaatgatggcgtcacgaccatcgctaataaccttaccagcacggttcaagtcttctcggactcggagtaccagttgccgtacgtcctcggctctgcgcaccagggctgcctccctccgttcccggcggacgtgttcatgattccgcagtacggctacctaacgctcaacaatggcagccaggcagtgggacggtcatccttttactgcctggaatatttcccatcgcagatgctgagaacgggcaataactttaccttcagctacaccttcgaggacgtgcctttccacagcagctacgcgcacagccagagcctggaccggctgatgaatcctctcatcgaccagtacctgtattacctgaacagaactcagaatcagtccggaagtgcccaaaacaaggacttgctgtttagccgggggtctccagctggcatgtctgttcagcccaaaaactggctacctggaccctgttaccggcagcagcgcgtttctaaaacaaaaacagacaacaacaacagcaactttacctggacaggtgcttcaaaatataaccttaatgggcgtgaatctataatcaaccctggcactgctatggcctcacacaaagacgacaaagacaagttctttcccatgagcggtgtcatgatttttggaaaggagagcgccggagcttcaaacactgcattggacaatgtcatgatcacagacgaagaggaaatcaaagccactaaccccgtggccaccgaaagatttgggactgtggcagtcaatctccagaacagcagcacagaccctgcgaccggagatgtgcatgttatgggagccttacctggaatggtgtggcaagacagagacgtatacctgcagggtcctatttgggccaaaattcctcacacggatggacactttcacccgtctcctctcatgggcggctttggacttaagcacccgcctcctcagatcctcatcaaaaacacgcctgttcctgcgaatcctccggcagagttttcggctacaaagtttgcttcattcatcacccagtattccacaggacaagtgagcgtggagattgaatgggagctgcagaaagaaaacagcaaacgctggaatcccgaagtgcagtatacatctaactatgcaaaatctgccaacgttgatttcactgtagacaacaatggactttatactgtgcctcgccccattggcacccgttacctcacccgtcccctgtaa

SEQ ID NO: 1008 - DNA, 2211 bp, Artificial Sequence
  Description of Artificial Sequence: Synthetic polynucleotide
atggctgccgatggttatcttccagattggctcgaggacaacctctctgagggcattcgcgagtggtgggcgctgaaacctggagccccgaagcccaaagccaaccagcaaaagcaggacgacggccggggtctggtgcttcctggctacaagtacctcggacccttcaacggactcgacaaaggagagccggtcaacgcggcggacgcggcggccctcgaacacgacaaggcttacgaccagcagctcaaggcgggtgacaacccctacctgcggtataaccacgccgacgccgagttccaggagcggctgcaagaagatacgtcttttgggggcaacctcgggcgagcagtcttccaggccaaaaagaggcttcttgaacctcttggtctggttgaggaaggcgctaagacggctcctggaaagaagaggcctgtagagcagtctcctcaagaaccggactcctcctcgggtattggcaaaacaggtgagcagcccgctaaaaagagactcaattttggtcagactggcgactcagagtcagtccccgacccacaacctctcggagaacctccagcaacccccgctgctgtgggacctactacaatggcttcaggcggtggcgcaccaatggcagacaataacgaaggcgccgacggagtgggtagtgcctcaggaaattggcattgcgattccacatggctgggcgacagagtcatcaccaccagcacccgaacctgggccctgcccacctataacaaccatctctacaagcaaatctccagtgcttcaacgggggccagcaacgacaaccactacttcggctacagcaccccctgggggtattttgacttcaacagattccactgccacttctcaccacgtgactggcagcgactcatcaacaacaactggggattccggcctaagcgactcaacttcaagctcttcaacattcaggtcaaagaggttacggacaacaatggagtcaagaccatcgccaataacctcaccagcaccatccaggtgttcacggactcagagtatcagctgccgtacgtgctcgggtcggctcaccagggctgcctccctccgttcccagcggacgtgttcatgattcctcagtacgggtatctgacactcaacaacggcagtcaggcagtgggacggtcatccttctactgcctggaatattttccatcgcagatgctgagaaccggcaacaactttccgttcagttacaccttcgaggacgtgcctttccacagcagctacgcgcacagccagagcctggaccggctgatgaatcctctgattgaccagtacctgtactacttgtctcggactcaaacaacaggaggcacggcaaatacgcagactctgggcttcagccaaggtgggcctaatacaatggccaatcaggcaaagaactggctgccaggaccctgttaccgccaacaacgcgtctcaacgacaaccgggcaaaacaacaatagcaactttgcctggactgctgggaccaaataccatctgaatggaagaaattcattggctaatcctggcatcgctatggcaacacacaaagacgacaaggagcgtttttttcccagtaacgggatcctgatttttggcaaacaaaatgctgccagagacaatgcggattacagcgatgtcatgctcaccagcgaggaagaaatcaaaaccactaaccctgtggctacagaggaatacggtatcgtggcagataacttgcagcagcaaaacacggctcctcaaattggaactgtcaacagccagggggccttacccggtatggtctggcagaaccgggacgtgtacctgcagggtcccatctgggccaagattcctcacacggacggcaacttccacccgtctccgctgatgggcggctttggcctgaaacatcctccgcctcagatcctgatcaagaacacgcctgtacctgcggatcctccgaccaccttcaaccagtcaaagctgaactctttcatcacgcaatacagcaccggacaggtcagcgtggaaattgaatgggagctgcagaaggaaaacagcaagcgctggaaccccgagatccagtacacctccaactactacaaatctacaagtgtggactttgctgttaatacagaaggcgtgtactctgaaccccaccccattggcacccgttacctcacccgtcccctgtaa

SEQ ID NO: 1009 - DNA, 2211 bp, Artificial Sequence
  Description of Artificial Sequence: Synthetic polynucleotide
atggctgccgatggttatcttccagattggctcgaggacaacctctctgagggcattcgcgagtggtgggcgctgaaacctggagccccgaagcccaaagccaaccagcaaaagcaggacgacggccggggtctggtgcttcctggctacaagtacctcggacccttcaacggactcgacaagggggagcccgtcaacgcggcggacgcagcggccctcgagcacgacaaggcctacgaccagcagctcaaagcgggtgacaatccgtacctgcggtataaccacgccgacgccgagtttcaggagcgtctgcaagaagatacgtcttttgggggcaacctcgggcgagcagtcttccaggccaagaagcgggttctcgaacctctcggtctggttgaggaaggcgctaagacggctcctggaaagaaacgtccggtagaacagtcgccacaagagccagactcctcctcgggcatcggcaagacaggccagcagcccgctaaaaagagactcaattttggtcagactggcgactcagagtcagtccccgatccacaacctctcggagaacctccagcaacccccgctgctgtgggacctactacaatggcttcaggcggtggcgcaccaatggcagacaataacgaaggcgccgacggagtgggtagttcctcgggaaattggcattgcgattcccaatggctgggggacagagtcatcaccaccagcacccgaacctgggccctgcccacctacaacaaccacctctacaagcaaatctccagtgcttcaacgggggccagcaacgacaaccactacttcggctacagcaccccctgggggtattttgatttcaacagattccactgccatttctcaccacgtgactggcagcgactcatcaacaacaactggggattccggcctaagcgactcaacttcaagctcttcaacattcaggtcaaagaggttacggacaacaatggagtcaagaccatcgccaataaccttaccagcacggtccaggtcttcacggactcggagtaccagttgccgtacgtcctcggctctgcgcaccaggactgcctccctccgttcccggcggacgtgttcatgattccgcagtacggctacctaacgctcaacaatggcagccaggcagtgggacggtcatccttttactgcctggaatatttcccatcgcagatgctgagaacgggcaacaactttaccttcagctacacctttgaggacgttcctttccacagcagctacgctcacagccagagtctggaccgtctcatgaatcctctgattgaccagtacctgtactacttgtctcggactcaaacaacaggaggcacggcaaatacgcagactctgggcttcagccaaggtgggcctaatacaatggccaatcaggcaaagaactggctgccaggaccctgttaccgccaacaacgcgtctcaacgacaaccggacaaaacaacaatagcaactttgcctggactgctgggaccaaataccatctgaatggaagaaattcattggctaatcctggcatcgctatggcaacacacaaagacgacaaggagcgtttttttcccagtaacgggatcctgatttttggcaaacaaaatgctgccagagacaatgcggattacagcgatgtcatgctcaccagcgaggaagaaatcaaaaccactaaccctgtggctacagaggaatacggtatcgtggcagataacttgcagcagcaaaacacggctcctcaaattggaactgtcaacagccagggggccttacccggtatggtctggcagaaccgggacgtgtacctgcagggtcccatctgggccaagattcctcacacggacggcaacttccacccgtctccgctgatgggcggctttggcctgaaacatcctccgcctcagatcctgatcaagaacacgcctgtacctgcggatcctccgaccaccttcaaccagtcaaagctgaactctttcatcacgcaatacagcaccggacaggtcagcgtggaaattgaatgggagctgcagaaggaaaacagcaagcgctggaaccccgagatccagtacacctccaactactacaaatctacaagtgtggactttgctgttaatacagaaggcgtgtactctgaaccccaccccattggcacccgttacctcacccgtcccctgtaa

SEQ ID NO: 1010 - DNA, 2211 bp, Artificial Sequence
  Description of Artificial Sequence: Synthetic polynucleotide
atggctgccgatggttatcttccagattggctcgaggacaacctctctgagggcattcgcgagtggtgggacttgaaacctggagccccgaagcccaaagccaaccagcaaaagcaggacgacggccggggtctggtgcttcctggctacaagtacctcggacccttcaacggactcgacaagggggagcccgtcaacgcggcggacgcagcggccctcgagcacgacaaggcctacgaccagcagctcaaagcgggtgacaatccgtacctgcggtataaccacgccgacgccgagtttcaggagcgtctgcaagaagatacgtcttttgggggcaacctcgggcgagcagtcttccaggccaagaagcgggttctcgaacctctcggtctggttgaggaaggcgctaagacggctcctggaaagaaacgtccggtagagcagtcaccacaagagccagactcctcctcgggcatcggcaagacaggccagcagcccgctaaaaagagactcaattttggtcagactggcgactcagagtcagtccccgacccacaacctctcggagaacctccagcaacccccgctgctgtgggacctactacaatggcttcaggcggtggcgcaccaatggcagacaataacgaaggtgccgacggagtgggtaatgcctcaggaaattggcattgcgattccacatggctgggcgactgagtcatcaccaccagcacccgcacctgggccttgcccacctacaataaccacctctacaagcaaatctccagtgcttcaacgggggccagcaacgacaaccactacttcggctacagcaccccctgggggtattttgatttcaacagattccactgccacttttcaccacgtgactggcagcgactcatcaacaacaattggggattccggcccaagagactcaacttcaaactcttcaacatccaagtcaaggaggtcacgcagaatgaaggcaccaagaccatcgccaataacctcaccagcaccatccaggtgtttacggactcggagtaccagctgccgtacgttctcggctctgcccaccagggctgcctgcctccgttcccggcggacgtgttcatgattccccagtacggctacctaacgctcaacaatggcagccaggcagtgggacggtcatccttttactgcctggaatactttccttcgcagatgctgagaaccggcaacaacttccagtttacttacaccttcgaggacgtgcctttccacagcagctacgcccacagccagagcttggaccggctgatgaatcctctgattgaccagtacctgtactacttgtctcggactcaaacaacaggaggcacggcaaatacgcagactctgggcttcagccaaggtgggcctaatacaatggccaatcaggcaaagaactggctgccaggaccctgttaccgccaacaacgcgtctcaacgacaaccgggcaaaacaacaatagcaactttgcctggactgctgggaccaaataccatctgaatggaagaaattcattggctaatcctggcatcgctatggcaacacacaaagacgacaaggagcgtttttttcccagtaacgggatcctgatttttggcaaacaaaatgctgccagagacaatgcggattacagcgatgtcatactcaccagcgaggaagaaatcaaaaccactaaccctgtggctacagaggaatacggtatcgtggcagataacttgcagcagcaaaacacggctcctcaaattggaactgtcaacagccagggggccttacccggtatggtctggcagaaccgggacgtgtacctgcagggtcccatctgggccaagattcctcacacggacggcaacttccacccgtctccgctgatgggcggctttggcctgaaacatcctccgcctcagatcctgatcaagaacacgcctgtacctgcggatcctccgaccaccttcaaccagtcaaagctgaactctttcatcacgcaatacagcaccggacaggtcagcgtggaaattgaatgggagctgcagaaggaaaacagcaagcgctggaaccccgagatccagtacacctccaactactacaaatctacaagtgtggactttgctgttaatacagaaggcgtgtactctgaaccccaccccattggcacccgttacctcacccgtcccctgtaa

SEQ ID NO: 1011 - DNA, 2211 bp, Artificial Sequence
  Description of Artificial Sequence: Synthetic polynucleotide
atggctgccgatggttatcttccagattggctcgaggacactctctctgaaggaataagacagtggtggaagctcaaacctggcccaccaccaccaaagcccgcagagcggcataaggacgacagcaggggtcttgtgcttcctgggtacaagtacctcggacccttcaacggactcgacaagggagagccggtcaacgaggcagacgccgcggccctcgagcacgacaaagcctacgaccggcagctcgacagcggagacaacccgtacctcaagtacaaccacgccgacgcggagtttcaggagcgccttaaagaagatacgtcttttgggggcaacctcgggcgagcagtcttccaggccaagaagagggttctcgaaccttttggtctggttgaggaaggtgctaagacggctcctggaaagaaacgtccggtagagcagtcgccacaagagccagactcctcctcgggcattggcaagacaggccagcagcccgctaaaaagagactcaattttggtcagactggcgactcagagtcagtccccgacccacaacctctcggagaacctccagcaacccccgctgctgtgggacctactacaatggcttcaggcggtggcgcaccaatggcagacaataacgaaggcgccgacggagtgggtaatgcctcaggaaattggcattgcgattccacatggctgggcgacagagtcatcaccaccagcacccgaacatgggccttgcccacctataacaaccacctctacaagcaaatctccagtacttcaacgggggccagtaacgacaaccactacttcggctacagcaccccctgggggtattttgacttcaacagattccactgccacttctcaccacgtgactggcagcgactcatcaacaacaactggggattccggcctaagcgactcaacttcaagctcttcaacattcaggtcaaagaggttacggacaacaatggagtcaagaccatcgccaataaccttaccagcacggtccaggtcttcacggactcggagtaccagttgccgtacgtcctcggctctgcgcaccagggctgcctgcctccgttcccggcggacgtgttcatgattccgcagtacggctacctaacgctcaacaatggcagccaggcagtgggacggtcatccttttactgcctggaatatttcccatcgcagatgctgagaacgggcaacaactttaccttcagctacacttttgaggacgttcctttccacagcagctacgctcacagccagagtctggaccgtctcatgaatcctctgattgaccagtacctgtactacttgtctcggactcaaacaacaggaggcacggcaaatacgcagactctgggcttcagccaaggtgggcctaatacaatggccaatcaggcaaagaactggctgccaggaccctgttaccgccaacaacgcgtctcaacgacaaccggacaaaacaacaatagcaactttgcctggactgctgggaccaaataccatctgaatggaagaaattcattggctaatcctggcatcgctatggcaacacacaaagacgacaaggagcgtttttttcccagtaacgggatcctgatttttggcaaacaaaatgctgccagagacaatgcggattacagcgatgtcatgctcaccagcgaggaagaaatcaaaaccactaaccctgtggctacagaggaatacggtatcgtggcagataacttgcagcagcaaaacacggctcctcaaattggaactgtcaacagccagggggccttacccggtatggtctggcagaaccgggacgtgtacctgcagggtcccatctgggccaagattcctcacacggacggcaacttccacccgtctccgctgatgggcggctttggcctgaaacatcctccgcctcagatcctgatcaagaacacgcctgtacctgcggatcctccgaccaccttcaaccagtcaaagctgaactctttcatcacgcaatacagcaccggacaggtcagcgtggaaattgaatgggagctgcagaaggaaaacagcaagcgctggaaccccgagatccagtacacctccaactactacaaatctacaagtgtggactttgctgttaatacagaaggcgtgtactctgaaccccaccccattggcacccgttacctcacccgtcccctgtaa

SEQ ID NO: 1012 - DNA, 2208 bp, Artificial Sequence
  Description of Artificial Sequence: Synthetic polynucleotide
atggctgccgatggttatcttccagattggctcgaggacaacctctctgagggcattcgcgagtggtgggacttgaaacctggagccccgaagcccaaagccaaccagcaaaagcaggacgacggccggggtctggtgcttcctggctacaagtacctcggacccttcaacggactcgacaagggggagcccgtcaacgcggcggatgcagcggccctcgagcacgacaaggcctacgaccggcagctcgacagcggagacaacccgtacctgcggtataaccacgccgacgcggagtttcaggagcgccttaaagaagatacgtcttttgggggcaacctcgggcgagcagtcttccaggccaagaagagggttctcgaaccttttggtctggttgaggaaggtgctaagacggctcctggaaagaaacgtccggtagagcagtcgccacaagagccagactcctcctcgggcattggcaagacaggccagcagcccgctaaaaagagactcaattttggtcagactggcgactcagagtcagtccccgacccacaacctctcggagaacctccagcaacccccgctgctgtgggacctactacaatggcttcaggcggtggcgcaccaatggcagacaataacgaaggcgccgacggagtgggtaatgcctcaggaaattggcattgcgattccacatggctgggcgacagagtcatcaccaccagcacccgcacctgggccttgcccacctacaataaccacctctacaagcaaatctccagtgcttcaacgggggccagcaacgacaaccactacttcggctacagcaccccctgggggtattttgactttaacagattccactgccacttttcaccacgtgactggcaaagactcatcaacaacaactggggattccggcccaagagactcaacttcaagctcttcaacatccaggtcaaggaggtcacgcagaatgaaggcaccaagaccatcgccaataaccttaccagcacgattcaggtctttacggactcggaataccagctcccgtacgtcctcggctctgcgcaccagggctgcctccctccgttcccggcggacgtgttcatgattccgcagtacggctacctaacactcaacaacggtagtcaggccgtgggacgctcctccttctactgcctggaatactttccttcgcagatgctgagaaccggcaacaacttccagtttacttacaccttcgaggacgtgcctttccacagcagctacgcccacagccagagcttggaccggctgatgaatcctctgattgaccagtacctgtactacttgtctcggactcaaacaacaggaggcacggcaaatacgcagactctgggcttcagccaaggtgggcctaatacaatggccaatcaggcaaagaactggctgccaggaccctgttaccgccaacaacgcgtctcaacgacaaccgggcaaaacaacaatagcaactttgcctggactgctgggaccaaataccatctgaatggaagaaattcactggctaatcctggcatcgctatggcaacacacaaagacgacaggagcgtttttttccagtaccgggatcctgattttggcaaacaaaatgctgccagagacaatgcggattacagcgatgtcatgctcaccagcgaggaagaaatcaaaaccactaaccctgtggctacagaggaatacggtatcgtggcagataacttgcagcagcaaaacacggctcctcaaattggaactgtcaacagccagggggccttacccggtatggtctggcagaaccgggacgtgtacctgcagggtcccatctgggccaagattcctcacacggacggcaacttccacccgtctccgctgatgggcggctttggcctgaaacatcctccgcctcagatcctgatcaagaacacgcctgtacctgcggatcctccgaccaccttcaaccagtcaaagctgaactctttcatcacgcaatacagcaccggacaggtcagcgtggaaattgaatgggagctgcagaaggaaaacagcaagcgctggaaccccgagatccagtacacctccaactactacaaatctacaagtgtggactttgctgttaatacagaaggcgtgtactctgaaccccaccccattggcacccgttacctcacccgtcccctgtaa

SEQ ID NO: 1013 - DNA, 2211 bp, Artificial Sequence
  Description of Artificial Sequence: Synthetic polynucleotide
atggctgccgatggttatcttccagattggctcgaggacaacctctctgagggcattcgcgagtggtgggcgctgaaacctggagccccgaagcccaaagccaaccagcaaaagcaggacgacggccggggtctggtgcttcctggctacaagtacctcggacccttcaacggactcgacaagggggagcccgtcaacgcggcggatgcagcagccctcgaacacgacaaagcttacgaccagcagctcaaggccggtgacaacccctacctcaagtataaccacgccgacgccgagtttcaggagcgtcttcaaggagatacgtcttttgggggcaacctcggacgagcagtcttccaggccaagaagcgggttctcgaacctcttggtctggttgaggaagcggctaagacggctcctggaaagaagaggcctgtagagcagtctcctcaggaaccggactcctccgcgggtattggcaaatcgggtgcacagcccgctaaaaagagactcaatttcggtcagactggcgacacagagtcagtcccagaccctcaacctctcggagaacctccagcagcgccctctggtgtgggacctaatacaatggctgcaggcggtggcgcaccaatggcagacaataacgaaggtgccgatggagtgggtagttcctcgggaaattggcattgcgattcccaatggctgggggacagagtcatcaccaccagcacccgaacctgggccctgcccacctacaacaaccacctctacaagcaaatctccagtgcttcaacgggggccagcaacgacaaccactacttcggctacagcaccccttgggggtattttgacttcaacagattccactgccacttttcaccacgtgactggcagcgactcatcaacaacaactggggattccggcctaagcgactcaacttcaagctcttcaacattcaggtcaaagaggttacggacaacaatggagtcaagaccatcgccaataaccttaccagcacggtccaggtcttcacggactcagactatcagctcccgtacgtgctcgggtcggctcacgagggctgcctccctccgttcccggcggacgtgttcatgattccgcagtacggctacctaacgctcaacaatggcagccaggcagtgggacggtcatccttttactgcctggaatactttccttcgcagatgctgagaaccggcaacaacttccagtttacttacaccttcgaggacgtgcctttccacagcagctacgctcacagccagagtctggaccgtctcatgaatcctctgattgaccagtacctgtactacttgtctcggactcaaacaacaggaggcacggcaaatacgcagactctgggcttcagccaaggtgggcctaatacaatggccaatcaggcaaagaactggctgccaggaccctgttaccgccaacaacgcgtctcaacgacaaccgggcaaaacaacaatagcaactttgcctggactgctgggaccaaataccatctgaatggaagaaattcattggctaatcctggcatcgctatggcaacacacaaagacgacaaggagcgtttttttcccagtaacgggatcctgatttttggcaaacaaaatgctgccagagacaatgcggattacagcgatgtcatgctcaccagcgaggaagaaatcaaaaccactaaccctgtggctacagaggaatacggtatcgtagcagataacttgcagcagcaaaacacggctcctcaaattggaactgtcaacagccagggggccttacccggtatggtctggcagaaccgggacgtgtacctgcagggtcccatctgggccaagattcctcacacggacggcaacttccacccgtctccgctgatgggcggctttggcctgaaacatcctccgcctcagatcctgatcaagaacacgcctgtacctgcggatcctccgaccaccttcaaccagtcaaagctgaactctttcatcacgcaatacagcaccggacaggtcagcgtggaaattgaatgggagctgcagaaggaaaacagcaagcgctggaaccccgagatccagtacacctccaactactacaaatctacaagtgtggactttgctgttaatacagaaggcgtgtactctgaaccccaccccattggcacccgttacctcacccgtcccctgtaa

SEQ ID NO: 1014 - DNA, 2211 bp, Artificial Sequence
  Description of Artificial Sequence: Synthetic polynucleotide
atggctgccgatggttatcttccagattggctcgaggacactctctctgaaggaataagacagtggtggaagctcaaacctggcccaccaccaccaaagcccgcagagcggcataaggacgacagcaggggtcttgtgcttcctgggtacaagtacctcggacccttcaacggactcgacaagggagagccggtcaacgaggcagacgccgcggccctcgagcacgacaaagcctacgaccggcagctcgacagcggagacaacccgtacctcaagtacaaccacgccgacgcggagtttcaggagcgccttaaagaagatacgtcttttgggggcaacctcgggcgagcagtcttccaggccaagaagagggttctcgaaccttttggtctggttgaggaagcggctaagacggctcctggaaagaaacgtccggtagagcagtcgccacaagagccagactcctcctcgggcattggcaagacaggccagcagcccgctaaaaagagactcaattttggtcagactggcgactcagagtcagtccccgacccacaacctctcggagaacctccagcaacccccgctgctgtgggacctactacaatggcttcaggcggtggcgcaccaatggcagacaataacgaaggcgccgacggagtgggtaatgcctcaggaaattggcattgcgattccacatggctgggcgacagagtcatcaccaccagcacccgaacatgggccttgcccacctataacaaccacctctacaagcaaatctccagtgcttcaacgggggccagcaacgacaaccactacttcggctacagcaccccctgggggtattttgacttcaacagattccactgccacttctcaccacgtgactggcagcgactcatcaacaacaactggggattccggcctaagcgactcaacttcaagctcttcaacattcaggtcaaagaggttacggacaacaatggagtcaagaccatcgccaataaccttaccagcacggtccaggtcttcacggactcagactatcagctcccgtacgtgctcgggtcggctcacgagggctgcctcccgccgttcccagcggacgttttcatgattcctcagtacggctacctaacactcaacaacggtagtcaggccgtgggacgctcctccttctactgcctggaatactttccttcgcagatgctgagaacgggcaacaactttaccttcagctacacctttgaggacgttcctttccacagcagctacgctcacagccagagtctggaccgtctcatgaatcctctgattgaccagtacctgtactacttgtctcggactcaaacaacaggaggcacggcaaatacgcagactctgggcttcagccaaggtgggcctaatacaatggccaatcaggcaaagaactggctgccaggaccctgttaccgccaacaacgcgtctcaacgacaaccgggcaaaacaacaatagcaactttgcctggactgctgggacaaaataccatctgaatggaagaaattcattggctaatcctggcatcgctatggcaacacacaaagacgacaaggagcgtttttttcccagtaacgggattctgatttttggcaaacaaaatgctgccagagacaatgcggattacagcgatgtcatgctcaccagcgaggaagaaatcaaaaccactaaccctgtggctacagaggaatacggtatcgtggcagataacttgcagcagcaaaacacggctcctcaaattggaactgtcaacagccagggggccttacccggtatggtctggcagaaccgggacgtgtacctgcagggtcccatctgggccaagattcctcacacggacggcaacttccacccgtctccgctgatgggcggctttggacttaagcacccgcctcctcagatcctcatcaaaaacacgcctgttcctgcggatcctccgaccaccttcaaccagtcaaagctgaactctttcatcacgcaatacagcaccggacaggtcagcgtggaaattgaatgggagctgcagaaggaaaacagcaagcgctggaaccccgagatccagtacacctccaactactacaaatctacaagtgtggactttgctgttaatacagaaggcgtgtactctgaaccccaccccattggcacccgttacctcacccgtcccctgtaa

SEQ ID NO: 1015 - DNA, 2211 bp, Artificial Sequence
  Description of Artificial Sequence: Synthetic polynucleotide
atggctgccgatggttatcttccagattggctcgaggacaacctctctgagggcattcgcgagtggtgggcgctgaaacctggagccccgaagcccaaagccaaccagcaaaagcaggacgacggccggggtctggtgcttcctggctacaagtacctcggacccttcaacggactcgacaaaggagagccggtcaacgcggcggacgcagcggccctcgagcacgacaaggcctacgaccagcagctcaaagcgggtgacaatccgtacctgcggtataaccacgccgacgccgagtttcaggagcgtctgcaagaagatacgtcttttgggggcaacctcgggcgagcagtcttccaggccaagaagcgggttctcgaacctctcggtctggttgaggaaggcgctaagacggctcctggaaagaaacgtccggtagagcagtcgccacaagagccagactcctcctcgggcatcggcaagacaggccagcagcccgctaaaaagagactcaattttggtcagactggcgactcagagtcagtccccgacccacaacctctcggagaacctccagcaacccccgctgctgtgggacctactacaatggcttcaggcggtggcgcaccaatggcagacaataacgaaggcgccgacggagtgggtagttcctcgggaaattggcattgcgattccacatggctgggcgacagagtcatcaccaccagcacccgcacctgggccttgcccacctacaataaccacctctacaagcaaatctccagtgcttcaacgggggccagcaacgacaaccactacttcggctacagcaccccctgggggtattttgacttcaacagattccactgccacttctcaccacgtgactggcagcgactcatcaacaacaactggggattccggcctaagcgactcaacttcaagctcttcaacattcaggtcaaagaggttacggacaacaatggagtcaagaccatcgccaataaccttaccagcacggtccaggtcttcacggactcggagtaccagttgccgtacgtcctcggctctgcgcaccagggctgcctccctccgttcccggcggacgtgttcatgattccgcagtacggctacctaacgctcaacaatggcagccaggcagtgggacggtcatccttttactgcctggaatatttcccatcgcagatgctgagaacgggcaacaactttaccttcagctacacctttgaggacgttcctttccacagcagctacgctcacagccagagtctggaccgtctcatgaatcctctgattgaccagtacctgtactacttgtctcggactcaaacaacaggaggcacggcaaatacgcagactctgggcttcagccaaggtgggcctaatacaatggccaatcaggcaaagaactggctgccaggaccctgttaccgccaacaacgcgtctcaacgacaaccgggcaaaacaacaatagcaactttgcctggactgctgggaccaaataccatctgaatggaagaaattcattggctaatcctggcatcgctatggcaacacacaaagacgacaaggagcgtttttttcccagtaacgggatcctgatttttggcaaacaaaatgctgccagagacaatgcggattacagcgatgtcatgctcaccagcgaggaagaaatcaaaaccactaaccctgtggctacagaggaatacggtatcgtggcagataacttgcagcagcaaaacacggctcctcaaattggaactgtcaacagccagggggccttacccggtatggtctggcagaaccgggatgtgtacctgcagggtcccatctgggccaagattcctcacacggacggcaacttccacccgtctccgctgatgggcggctttggcctgaaacatcctccgcctcagatcctgatcaagaacacgcctgtacctgcggatcctccgaccaccttcaaccagtcaaagctgaactctttcatcacgcaatacagcaccggacaggtcagcgtggaaattgaatgggagctgcagaaggaaaacagcaagcgctggaaccccgagatccagtacacctccaactactacaaatctacaagtgtggactttgctgttaatacagaaggcgtgtactctgaaccccaccccattggcacccgttacctcacccgtcccctgtaa

SEQ ID NO: 1016 - DNA, 2214 bp, Artificial Sequence
  Description of Artificial Sequence: Synthetic polynucleotide
atggctgccgatggttatcttccagattggctcgaggacaaccttagtgaaggaattcgcgagtggtgggcgctgaaacctggagccccgaagcccaaagccaaccagcaaaagcaggacgacggccggggtctggtgcttcctggctacaagtacctcggacccttcaacggactcgacaagggggagcccgtcaacgcggcggacgcagcggccctcgagcacgacaaggcctacgaccagcagctcaaagcgggtgacaatccgtacctgcggtataaccacgccgacgccgagtttcaggagcgtctgcaagaagatacgtcttttgggggcaacctcgggcgagcagtcttccaggccaagaagcgggttctcgaacctctcggtctggttgaggaaggcgctaagacggctcctggaaagaaacgtccggtagagcagtcgccacaagagccagactcctcctcgggcatcggcaagacaggccagcagcccgctaaaaagagactcaatttcggtcagactggcgacacagagtcagtcccagaccctcaaccaatcggagaacctcccgcagccccctcaggtgtgggatctcttacaatggcttcaggtggtggcgcaccagtggcagacaataacgaaggtgccgatggagtgggtagttcctcgggaaattggcattgcgattcccaatggctgggggacagagtcatcaccaccagcaccagaacctgggccttgcccacctacaataaccacctctacaagcaaatctccaacagcacatctggaggatcttcaaatgacaacgcctacttcggctacagcaccccctgggggtattttgactttaacagattccactgccacttttcaccacgtgactggcagcgactcatcaacaacaactggggattccgacccaagagactcaacttcaagctcttcaacatccaggtcaaggaggtcacgcagaacgaaggcaccaagaccatcgccaataacctcaccagcaccatccaggtgtttacggactcggagtaccagctgccgtacgttctcggctccgcccaccagggctgcctgcctccgttcccggcggacgtgttcatgattccccagtacggctacctaacgctcaacaacggtagtcaggccgtgggacgctcctccttctactgcctggaatactttccttcgcagatgctgagaaccggcaacaacttccagtttacttacaccttcgaggacgtgcctttccacagcagctacgcgcacagccagagcttggaccggctgatgaatcctctgattgaccagtacctgtactacttgtctcggactcaaacaacaggaggcacggcaaatacgcagactctgggcttcagccaaggtgggcctaatacaatggccaatcaggcaaagaactggctgccaggaccctgttaccgccaacaacgcgtctcaacgacaaccgggcaaaacaacaatagcaactttgcctggactgctgggaccaaataccatctgaatggaagaaattcattggctaatcctggcatcgctatggcaacacacaaagacgacaaggagcgtttttttcccagtaacgggatcctgatttttggcaaacaaaatgctgccagagacaatgcggattacagcgatgtcatgctcaccagcgaggaagaaatcaaaaccactaaccctgtggctacagaggaatacggtatcgtggcagataacttgcagcagcaaaacacggctcctcaaattggaactgtcaacagccagggggccttacccggtatggtctggcagaaccgggacgtgtacctgcagggtcccatctgggccaagattcctcacacggacggcaacttccacccgtctccgctgatgggcggctttggcctgaaacatcctccgcctcagatcctgatcaagaacacgcctgtacctgcggatcctccgaccaccttcaaccagtcaaagctgaactctttcatcacgcaatacagcaccggacaggtcagcgtggaaattgaatgggagctgcagaaggaaaacagcaagcgctggaaccccgagatccagtacacctccaactactacaaatctacaagtgtggactttgctgttaatacagaaggcgtgtactctgaaccccaccccattggcactcgttacctcacccgtcccctgtaa

SEQ ID NO: 1017 - DNA, 2211 bp, Artificial Sequence
  Description of Artificial Sequence: Synthetic polynucleotide
atggctgccgatggttatcttccagattggctcgaggacaacctctctgagggcattcgcgagtggtgggcgctgaaacctggagccccgaagcccaaagccaaccagcaaaagcaggacgacggccggggtctggtgcttcctggctacaagtacctcggacccttcaacggactcgacaagggggagcccgtcaacgcggcggatgcagcagccctcgaacacgacaaagcttacgaccagcagctcaaggccggtgacaacccctacctcaagtataaccacgccgacgccgagtttcaggagcgtcttcaaggagatacgtcttttgggggcaacctcggacgagcagtcttccaggccaagaagcgggttctcgaacctcttggtctggttgaggaagcggctaagacggctcctggaaagaagaggcctgtagagcagtctcctcaggaaccggactcctccgcgggtattggcaaatcgggtgcacagcccgctaaaaagagactcaatttcggtcagactggcgacacagagtcagtcccagaccctcaacctctcggagaacctccagcagcgccctctggtgtgggacctaatacaatggctgcaggcggtggcgcaccaatggcagacaataacgaaggtgccgatggagtgggtagttcctcgggaaattggcattgcgattcccaatggctgggggacagagtcatcaccaccagcacccgaacctgggccctgcccacctacaacaaccacctctacaagcaaatctccagtgcttcaacgggggccagcaacgacaaccactacttcggctacagcaccccttgggggtattttgacttcaacagattccactgccacttctcaccacgtgactggcagcgactcatcaacaacaactggggattccggcctaagcgactcaacttcaagctcttcaacattcaggtcaaagaggttacggacaacaatggagtcaagaccatcgccaataaccttaccagcacggtccaggtcttcacggactcggagtaccagttgccgtacgtcctcggctctgcgcaccagggctgcctccctccgttcccggcggacgtgttcatgattccgcagtacggctacctaacgctcaacaatggcagccaggcagtgggacggtcatccttttactgcctggaatatttcccatcgcagatgctgagaacgggcaacaactttaccttcagctacacctttgaggacgttcctttccacagcagctacgctcacagccagagtctggaccgtctcatgaatcctctgattgaccagtacctgtactacttgtctcggactcaaacaacaggaggcacggcaaatacgcagactctgggcttcagccaaggtgggcctaatacaatggccaatcaggcaaagaactggctgccaggaccctgttaccgccaacaacgcgtctcaacgacaaccgggcaaaacaacaatagcaactttgcctggactgctgggaccaaataccatctgaatggaagaaattcattggctaatcctggcatcgctatggcaacacacaaagacgacaaggagcgtttttttcccagtaacgggatcctgatttttgacaaacaaaatgctgccagagacaatgcggattacagcgatgtcatgctcaccagcgaggaagaaatcaaaaccactaaccctgtggctacagaggaatacggtatcgtggcagataacttgcagcagcaaaacacggctcctcaaattggaactgtcaacagccagggggccttacccggtatggtctggcagaaccgggatgtgtacctgcagggtcccatctgggccaagattcctcacacggacggcaacttccacccgtctccgctgatgggcggctttggcctgaaacatcctccgcctcagatcctgatcaagaacacgcctgtacctgcggatcctccgaccaccttcaaccagtcaaagctgaactctttcatcacgcaatacagcaccggacaggtcagcgtggaaattgaatgggagctgcagaaggaaaacagcaagcgctggaaccccgagatccagtacacctccaactactacaaatctacaagtgtggactttgctgttaatacagaaggcgtgtactctgaaccccaccccattggcacccgttacctcacccgtcccctgtaa

SEQ ID NO: 1018 - DNA, 2211 bp, Artificial Sequence
  Description of Artificial Sequence: Synthetic polynucleotide
atggctgccgatggttatcttccagattggctcgaggacactctctctgaaggaataagacagtggtggaagctcaaacctggcccaccaccaccaaagcccgcagagcggcataaggacgacagcaggggtcttgtgcttcctgggtacaagtacctcggacccttcaacggactcgacaagggagagccggtcaacgaggcagacgccgcggccctcgagcacgacaaagcctacgaccggcagctcgacagcggagacaacccgtacctcaagtacaaccacgccgacgcggagtttcaggagcgccttaaagaagatacgtcttttgggggcaacctcggacgagcagtcttccaggcgaaaaagagggttcttgaacctctgggcctggttgaggaacctgttaagacggctccgggaaaaaagaggccggtagagcactctcctgtggagccagactcctcctcgggaaccggaaaggcgggccagcagcctgcaagaaaaagattgaattttggtcagactggcgactcagagtcagtccccgacccacaacctctcggagaacctccagcaacccccgctgctgtgggacctaatacgatggctacaggcagtggcgcaccaatggcagacaataacgagggcgccgacggagtgggtaattcctcgggaaattggcattgcgattccacatggatgggcgacagagtcatcaccaccagcaccagaacctgggccctgcccacttacaacaaccatctctacaagcaaatctccagtgcttcaacgggggccagcaacgacaaccactacttcggctacagcaccccctgggggtattttgacttcaacagattccactgccacttctcaccacgtgactggcagcgactcatcaacaacaactggggattccggcctaagcgactcaacttcaagctcttcaacattcaggtcaaagaggttacggacaacaatggagtcaagaccatcgccaataaccttaccagcaccatccaggtctttacggactcggaataccagctgccgtacgttctcggctctgcccaccagggctgcctgcctccgttcccggcggacgtgttcatgattccccagtacggctacctaacactcaacaacggtagtcaggccgtgggacgctcctccttctactgcctggaatatttcccatcgcagatgctgagaacgggcaacaactttaccttcagctacacctttgaggacgttcctttccacagcagctacgctcacagccagagtctggaccgtctcatgaatcctctgattgaccagtacctgtactacttgtctcggactcaaacaacaggaggcaaggcaaatacgcagactctgggcttcagccaaggtgggcctaatacaatggccaatcaggcaaagaactggctgccaggaccctgttaccgccaacaacgcgtctcaacgacaaccgggcaaaacaacaatagcaactttgcctggactgctgggaccaaataccatctgaatggaagaaattcattggctaatcctggcatcgctatggcaacacacaaagacgacaaggagcgtttttttcccagtaacgggatcctgatttttggcaaacaaaatgctgccagagacaatgcggattacagcgatgtcatgctcaccagcgaggaagaaatcaaaaccactaaccctgtggctacagaggaatacggtatcgtggcagataacttgcagcagcaaaacacggctcctcaaattggaactgtcaacagccagggggccttacccggtatggtctggcagaaccgggacgtgtacctgcagggtcccatctgggccaagattcctcacacggacggcaacttccacccgtctccgctgatgggcggctttggcctgaaacatcctccgcctcagatcctgatcaagaacacgcctgtacctgcggatcctccgaccaccttcaaccagtcaaagctgaactctttcatcacgcaatacagcaccggacaggtcagcgtggaaattgaatgggagctgcagaaggaaaacagcaagcgctggaaccccgagatccagtacacctccaactactacaaatctacaagtgtggactttgctgttaatacagaaggcgtgtactctgaaccccaccccattggcacccgttacctcacccgtcccctgtaa

SEQ ID NO: 1019 - DNA, 2211 bp, Artificial Sequence
  Description of Artificial Sequence: Synthetic polynucleotide
atggctgccgatggttatcttccagattggctcgaggacaacctctctgagggcattcgcgagtggtgggcgctgaaacctggagccccgaagcccaaagccaaccagcaaaagcaggacgacggccggggtctggtgcttcctggctacaagtacctcggacccttcaacggactcgacaagggggagcccgtcaacgcggcggacgcagcggccctcgagcacgacaaggcctacgaccagcagctcaaagcgggtgacaatccgtacctgcggtataaccacgccgacgccgagtttcaggagcgtctgcaagaagatacgtcttttgggggcaacctcgggcgagcagtcttccaggccaagaagcgggttctcgaaccttttggtctggttgaggaaggtgctaagacggctcctggaaagaaacgtccggtagagcagtcgccacaagagccagactcctcctcgggcatcggcaagacaggccagcagcccgctaaaaagagactcaattttggtcagactggcgactcagagtcagtccccgacccacaacctctcggagaacctccagcaacccccgctgctgtgggacctactacaatggcttcaggcggtggcgcaccaatggcggacaataacgaaggcgccgacggagtgggtaatgcctcaggaaattggcattgcgattccacatggctgggcgacagagtcatcaccaccagcacccgcacctgggccttgcccacctacaataaccacctctacaagcaaatctccagtgcttcaacgggggccagcaacgacaaccactacttcggctacagcaccccctgggggtattttgacttcaacagattccactgccacttttcaccacgtgactggcaaagactcatcaacaacaactggggattccggcctaagcgactcaacttcaagctcttcaacattcaggtcaaagaggttacggacaacaatggagtcaagaccatcgccaataaccttaccagcacggtccaggtcttcacggactcggagtaccagttgccgtacgtcctcggctctgcgcaccagggctgcctccctccgttcccggcggacgtgttcatgattccgcagtacggctacctaacgctcaacaatggcagccaggcagtgggacggtcatccttttactgcctggaatatttcccatcgcagatgctgagaacgggcaacaactttaccttcagctacacctttgaggacgttcctttccacagcagctacgctcacagccagagtctggaccgtctcatgaatcctctgattgaccagtacctgtactacttgtctcggactcaaacaacaggaggcacgggaaatacgcagactctgggcttcagccaaggtgggcctaatacaatggccaatcaggcaaagaactggctgccaggaccctgttaccgccaacaacgcgtctcaacgacaaccgggcaaaacaacaatagcaactttgcctggactgctgggaccaaataccatctgaatggaagaaattcattggctaatcctggcatcgctatggcaacacacaaagacgacaaggagcgtttttttcccagtaacgggatcctgatttttggcaaacaaaatgctgccagagacaatgcggattacagcgatgtcatgctcaccagcgaggaagaaatcaaaaccactaaccctgtggctacagaggaatacggtatcgtggcagataacttgcagcagcaaaacacggctcctcaaattggaactgtcaacagccagggggccttacccggtatggtctggcagaaccgggacgtgtacctgcagggtcccatctgggccaagattcctcacacggacggcaacttccacccgtctccgctgatgggcggctttggcctgaaacatcctccgcctcagatcctgatcaagaacacgcctgtacctgcggatcctccgaccaccttcaaccagtcaaagctgaactctttcatcacgcaatacagcaccggacaggtcagcgtggaaattgaatgggagctgcagaaggaaaacagcaagcgctggaaccccgagatccagtacacctccaactactacaaatctacaagtgtggactttgctgttaatacagaaggcgtgtactctgaaccccaccccattggcacccgttacctcacccgtcccctgtaa

SEQ ID NO: 1020 - DNA, 2211 bp, Artificial Sequence
  Description of Artificial Sequence: Synthetic polynucleotide
atggctgccgatggttatcttccagattggctcgaggacaacctctctgagggcattcgcgagtggtgggacttgaaacctggagccccgaaacccaaagccaaccagcaaaagcaggacgacggccggggtctggtgcttcctggctacaagtacctcggacccttcaacggactcgacaagggggagcccgtcaacgcggcggacgcagcggccctcgagcacgacaaggcctacgaccagcagctcaaagcgggtgacaatccgtacctgcggtataaccacgccgacgccgagtttcaggagcgtctgcaagaagatacgtcttttgggggcaacctcgggcgagcagtcttccaggccaagaagcgggttctcgaacctctcggtctggttgaggaaggcgctaagacggctcctggaaagaagaggcctgtagagcagtcgccacaagagccagactcctcctcgggcatcggcaagacaggccagcagcccgctaaaaagagactcaattttggtcagactggcgactcagagtcagtccccgatccacaacctctcggagaacctccagcaacccccgctgctgtgggacctactacaatggcttcaggcggtggcgcaccaatggcagacaataacgaaggcgccgacggagtgggtagttcctcgggaaattggcattgcgattccacatggctgggcgacagagtcatcaccaccagcacccgaacatgggccttgcccacctataacaaccacctctacaagcaaatctccagtgcttcaacgggggccagcaacgacaaccactacttcggctacagcaccccctgggggtattttgacttcaacagattccactgccacttctcaccacgtgactggcagcgactcatcaacaacaactggggattccggcctaagcgactcaacttcaagctcttcaacatccaggtcaaggaggtcacgcagaatgaaggcaccaagaccatcgccaataacctcaccagcaccatccaggtgtttacggactcggagtaccagcttccgtacgtcctcggctctgcgcaccagggctgcctccctccgttcccggcggacgtgttcatgattccgcagtacggctacctaacgctcaacaatggcagccaggcagtgggacggtcatccttttactgcctggaatatttcccatcgcagatgctgagaacgggcaacaactttaccttcagctacacctttgaggacgttcctttccacagcagctacgcgcacagccagagcttggaccggctgatgaatcctctgattgaccagtacctgtactacttgtctcggactcaaacaacaggaggcacggcaaatacgcagactctgggcttcagccaaggtgggcctaatacaatggccaatcaggcaaagaactggctgccaggaccctgttaccgccaacaacgcgtctcaacgacaaccgggcaaaacaacaatagcaactttgcctggactgctgggaccaaataccatctgaatggaagaaattcattggctaatcctggcatcgctatggcaacacacaaagacgacaaggagcgtttttttcccagtaacgggatcctgatttttggcaaacaaaatgctgccagagacaatgcggattacagcgatgtcatgctcaccagcgaggaagaaatcaaaaccactaaccctgtggctacagaggaatacggtatcgtggcagataacttgcagcagcaaaacacggctcctcaaattggaactgtcaacagccagggggccttacccggtatggtctggcagaaccgggacgtgtacctgcagggtcccatctgggccaagattcctcacacggacggcaacttccacccgtctccgctgatgggcggctttggcctgaaacatcctccgcctcagatcctgatcaagaacacgcctgtacctgcggatcctccgaccaccttcaaccagtcaaagctgaactctttcatcacgcaatacagcaccggacaggtcagcgtggaaattgaatgggagctgcagaaggaaaacagcaagcgctggaaccccgagatccagtacacctccaactactacaaatctacaagtgtggactttgctgttaatacagaaggcgtgtactctgaaccccaccccattggcacccgttacctcacccgtcccctgtaa

SEQ ID NO: 1021 - DNA, 2211 bp, Artificial Sequence
  Description of Artificial Sequence: Synthetic polynucleotide
atggctgccgatggttatcttccagattggctcgaggacaacctctctgagggcattcgcgagtggtgggcgctgaaacctggagccccgaagcccaaagccaaccagcaaaagcaggacgacggccggggtctggtgcttcctggctacaagtacctcggacccttcaacggactcgacaagggggagcccgtcaacgcggcggatgcagcggccctcgagcacgacaaggcctacgaccagcagctcaaagcgggtgacaatccgtacctgcggtataaccacgccgacgccgagtttcaggagcgtctgcaagaagatacgtcttttgggggcaacctcgggcgagcagtcttccaggccaagaagcgggttctcgaacctctcggtctggttgaggaaggcgctaagacggctcctggaaagaaacgtccggtagagcagtcgccacaagagccagactcctcctcgggcatcggcaagacaggccagcagcccgctaaaaagagactcaattttggtcagactggcgactcagagtcagtccccgacccacaacctctcggagaacctccagcaacccccgctgctgtgggacctactacaatggctgcaggcggtggcgcaccaatggcagacaataacgaaggcgccgacggagtgggtagttcctcgggaaattggcattgcgattccacatggatgggcgacagagtcatcaccaccagcacccgaacctgggccttgcccacctataacaaccatctctacaagcaaatctccagtgcttcaacgggggccagcaacgacaaccactacttcggctacagcaccccctgggggtattttgacttcaacagattccactgccacttctcaccacgtgactggcagcgactcatcaacaacaactggggattccggcccaagagactcagcttcaagctcttcaacatccaggtcaaggaggtcacgcagaatgaaggcaccaagaccatcgccaataacctcaccagcaccatccaggtgtttacggactcggagtaccagctgccgtacgtcctcggctctgcgcaccagggctgcctccctccgttcccggcggacgtgttcatgattccgcagtacggctacctaacgctcaacaatggcagccaggcagtgggacggtcatccttttactgcctggaatatttcccatcgcagatgctgagaacgggcaacaactttaccttcagctacacctttgaggacgttcctttccacagcagctacgctcacagccagagcttggaccggctgatgaatcctctgattgaccagtacctgtactacttgtctcggactcaaacaacaggaggcacggcaaatacgcagactctgggtttcagccaaggtgggcctaatacaatggccaatcaggcaaagaactggctgcaaggaccctgttaccgccaacaacgcgtctcaacgacaaccgggcaaaacaacaatagcaactttgcctggactgctgggaccaaataccatctgaatggaagaaattcattggctaatcctggcatcgctatggcaacacacaaagacgacaaggagcgtttttttcccagtaacgggatcctgatttttggcaaacaaaatgctgccagagacaatgcggattacagcgatgtcatgctcaccagcgaggaagaaatcaaaaccactaaccctgtggctacagaggaatacggtatcgtggcagataacttgcagcagcaaaacacggctcctcaaattggaactgtcaacagccagggggccttacccggtatggtctggcagaacctggacgtgtacctgcagggtcccatctgggccaagattcctcacacggacggcaacttccacccgtctccgctgatgggcggctttggcctgaaacatcctccgcctcagatcctgatcaagaacacgcctgtacctgcggatcctccgaccaccttcaaccagtcaaagctgaactctttcatcacgcaatacagcaccggacaggtcagcgtggaaattgaatgggagctgcagaaggaaaacagcaagcgctggaaccccgagatccagtacacctccaactactacaaatctacaagtgtggactttgctgttaatacagaaggcgtgtactctgaaccccaccccattggcacccgttacctcacccgtcccctgtaa

SEQ ID NO: 1022 - DNA, 2214 bp, Artificial Sequence
  Description of Artificial Sequence: Synthetic polynucleotide
atggctgccgatggttatcttccagattggctcgaggacaacctctctgagggcattcgcgagtggtgggcgctgaaacctggagccccgaagcccaaagccaaccagcaaaagcaggacgacggccggggtctggtgcttcctggctacaagtacctcggacccttcaacggactcgacaagggagagcccgtcaacgcggcggacgcagcggccctcgagcacgacaaggcctacgaccagcagctcaaagcgggtgacaatccgtacctgcggtataaccacgccgacgccgagtttcaggagcgtctgcaagaagatacgtcttttgggggcaacctcgggcgagcagtcttccaggccaagaagcgggttctcgaacctctcggtctggttgaggaaggcgctaagacggctcctggaaagaagagaccggtagagccatcaccccagcgttctccagactcctcctcgggcatcggcaagacaggccagcagcccgctaaaaagagactcaattttggtcagactggcgactcagagtcagtccccgacccacaacctctcggagaacctccagcaacccccgctgctgtgggacctactacaatggcttcaggtggtggcgcaccaatggcagacaataacgaaggcgccgacggagtgggtaatgcctcaggaaattggcattgcgattcccaatggctgggcgacagagtcatcaccaccagcacccgaacatgggccttgcccacctataacaaccacctctacaagcaaatctccagtgcttcaacgggggccagcaacgacaaccactacttcggctacagcaccccctgggggtattttgacttcaacagattccactgccacttttcaccacgtgactggcagcgactcatcaacaacaactggggattccggcctaagcgactcaacttcaagctcttcaacattcaggtcaaagaggttacggacaacaatggagtcaagaccatcgccaataaccttaccagcacggtccaggtcttcacggactcagactatcagctcccgtacgtgctcgggtcggctcacgagggctgcctcccgccgttcccagcggacgttttcatgattccccagtacggctacctaacactcaacaacggtagtcaggccgtgggacgctcctccttctactgcctggaatactttccttcgcagatgctgagaaccggcaacaacttccagtttacttacaccttcgaggacgtgcctttccacagcagctacgctcacagccagagcttggaccggctgatgaatcctctgattgaccagtacctgtactacttgtctcggactcaaacaacaggaggcacggcaaatacgcagactttgggcttcagccaaggtgggcctaatacaatggccaatcaggcaaagaactgggtgccaggaccctgttaccgccaacaacgggtttcaacggcaaccgggcaaaacaacaatagcaactttgcctggactgctgggaccaaataccatctgaaaggaagaaattcattggctaatcctggcatcgctatggcaacacacaaagacgacaaggagcgtttttttcccagtaacgggatcctgatttttggcaaacaaaatgctgccagagacaatgcggattacagcgatgtcatgctcaccagcgaggaagaaatcaaaaccactaaccctgtggctacagaggaatacggtatcgtggcagataacttgcagcagcaaaacacggctcctcaaattggaactgtcaacagccagggggccttacccggtatggtctggcagaaccgggacgtgtacctgcagggtcccatctgggccaagattcctcacacggacggcaacttccacccgtctccgctgatgggcggctttggcctgaaacatcctccgcctcagatcctgatcaagaacacgcctgtacctgcggatcctccgaccaccttcaaccagtcaaagctgaactctttcatcacgcaatacagcaccggacaggtcagcgtggaaattgaatgggagctgcagaaggaaaacagcaaacgctggaacccagagattcaatacacttccaactactacaaatctacaagtgtggactttgctgttaatacagaaggcgtgtactctgaaccccaccccattggcacccgttacctcacccgtcccctgtaa

SEQ ID NO: 1023 - DNA, 2214 bp, Artificial Sequence
  Description of Artificial Sequence: Synthetic polynucleotide
  modified_base (676)..(676): a, c, g, or t
  modified_base (697)..(697): a, c, g, or t
  modified_base (715)..(715): a, c, g, or t
  modified_base (748)..(748): a, c, g, or t
  modified_base (750)..(750): a, c, g, or t
  modified_base (757)..(757): a, c, g, or t
  modified_base (763)..(763): a, c, g, or t
atggctgccgatggttatcttccagattggctcgaggacactctctctgaaggaataagacagtggtggaagctcaaacctggcccaccaccaccaaagcccgcagagcggcataaggacgacagcaggggtcttgtgcttcctgggtacaagtacctcggacccttcaacggactcgacaagggagagccggtcaacgaggcagacgccgcggccctcgagcacgacaaagcctacgaccggcagctcgacagcggagacaacccgtacctcaagtacaaccacgccgacgcggagtttcaggagcgccttaaagaagatacgtcttttgggggcaacctcggacgagcagtcttccaggcgaaaaagagggttcttgaacctctcggtctggttgaggaaggcgctaagacggctcctggaaagaaacgtccggtagagcagtcgccacaagagccagactcctcctcgggcatcggcaagacaggccagcagcccgctaaaaagagactcaattttggtcagactggcgactcagagtcagtccccgacccacaacctctcggagaacctccagcaacgccctctggtgtgggacctaatacaatggctgcaggcggtggcgctccaatggcagacaataacgaaggcgccgacggagtgggtagttcctcangaaattggcattgcgattccncatggctgggcgacagantcatcaccaccagcacccgaacctgggccctgncnacctacnacaacnacctctacaagcaaatctccaacagcacatctggaggagccaccaacgacaacacctacttcggctacagcaccccctgggggtattttgactttaacagattccactgccacttttcaccacgtgactggcagcgactcatcaacaacaactggggattccggcctaagcgactcaacttcaagctcttcaacatccaggtcaaggaggtcacgcagaatgaaggcaccaagaccatcgccaataacctcaccagcaccatccaggtgtttacggactcggagtaccagctgccgtacgttctcggctctgcccaccagggctgcctgcctccgttcccggcggacgtgttcatgattccccagtacggctacctaacactcaacaacggtagtcaggccgtgggacgctcctccttctactgcctggaatactttccttcgcagatgctgagaaccggcaacaacttccagtttacttacaccttcgaggacgtgcctttccacagcagctacgcccacagccagagcttggaccggctgatgaatcctctgattgaccagtacctgtactacttgtctcggactcaaacaacaggaggcacggcaaatacgcagactctgggcttcagccaaggtgggcctaatacaatggccaatcaggcaaagaactggctgccaggaccctgttaccgccaacaacgcgtctcaacgacaaccgggcaaaacaacaatagcaactttgcctggactgctgggaccaaataccatctgaatggaagaaattcattggctaatcctggcatcgctatggcaacacacaaagacgacaaggagcgtttttttcccagtaacgggatcctgatttttggcaaacaaaatgctgccagagacaatgcggattacagcgatgtcatgctcaccagcgaggaagaaatcaaaaccactaaccctgtggctacagaggaatacggtatcgtggcagataacttgcagcagcaaaacacggctcctcaaattggaactgtcaacagccagggggccttacccggtatggtttggcagaaccgggacgtgtacctgcagggtcctatctgggccaagattcctcacacggacggaaactttcatccctcgccgctgatgggaggctttggactgaaacacccgcctcctcagatcctgattaagaatacacctgttcccgcggatcctccaactaccttcagtcaagctaagctggcgtcgttcatcacgcaatacagcacaggacaagtgagtgtggaaattgaatgggagctgcagaaagaaaacagcaagcgctggaatcccgaagtgcagtacacatccaattatgcaaaatctgccaacgttgattttactgtggacaacaatggactttatactgagcctcgccccattggcacccgttaccttacccgtcccctgtaa

SEQ ID NO: 1024 - DNA, 2214 bp, Artificial Sequence
  Description of Artificial Sequence: Synthetic polynucleotide
atggctgccgatggttatcttccagattggctcgaggacaacctctctgagggcattcgcgagtggtgggacttgaaacctggagccccgaagcccaaagccaaccagcaaaagcaggacgacggccggggtctggtgcttcctggctacaagtacctcggacccttcaacggactcgacaagggggagcccgtcaacgcggcggacgcagcggccctcgagcacgacaaggcctacgaccagcagctcaaagcgggtgacaatccgtacctgcggtataaccacgccgacgccgagtttcaggagcgtctgcaagaagatacgtcttttgggggcaacctcgggcgagcagtcttccaggccaagaagcgggttctcgaacctctcggtctggttgaggaaggcgctaagacggctcctggaaagaagagaccggtagagccatcaccccagcgttctccagactcctctacgggcatcggcaagaaaggccagcagcccgcgaaaaagagactcaactttgggcagactggcgactcagagtcagtgcccgaccctcaaccaatcggagaaccccccgcaggcccctctggtgtgggatctcttacaatggcttcaggtggtggcgcaccagtggcagacaataacgaaggtgccgatggagtgggtagttcctcgggaaattggcattgcgattcccaatggctgggggacagagtcatcaccaccagcacccgaacatgggccttgcccacctataacaaccacctctacaagcaaatctccagtgcttcaacgggggccagcaacgacaaccactacttcggctacagcaccccctgggggtattttgactttaacagattccactgccacttctcaccacgtgactggcagcgactcatcaacaacaactggggattccggcccaagagactcaacttcaagctcttcaacatccaggtcaaggaggtcacggacaatgatggagtcaagaccatcgccaataaccttaccagcacgattcaggtctttacggactcggaataccagttgccgtacgtcctcggctctgcgcaccagggctgcctgcctccgttcccggcggacgtgttcatgattccgcagtacggctacctaacgctcaacaatggcagccaggcagtgggacggtcatccttttactgcctggaatatttcccatcgcagatgctgagaacgggcaacaactttaccttcagctacacttttgaggacgttcctttccacagcagctacgctcacagccagagtctggaccgtctcatgaatcctctgattgaccagtacctgtactacttgtctcggactcaaacaacaggaggcacggcaaatacgcagactctgggcttcagccaaggtgggcctaatacaatggccaatcacgcaaagaactggctgccaggaccctgttaccgccaacaacgcgtctcaacgacaaccggacaaaacaacaatagcaactttgcctggactgctgggaccaaataccatctgaatggaagaaattcattggctaatcctggcatcgctatggcaacacacaaagacgacaaggagcgtttttttcccagtaacgggatcctgatttttggcaaacaaaatgctgccagagacaatgcggattacagcgatgtcatgctcaccagcgaggaagaaatcaaaaccactaaccctgtggctacagaggaatacggtatcgtggcagataacttgcagcagcaaaacacggctcctcaaattggaactgtcaacagccagggggccttacccggtatggtctggcagaaccgggacgtgtacctgcagggtcccatctgggccaagattcctcacacggacggcaacttccacccgtctccgctgatgggcggctttggcctgaaacatcctccgcctcagatcctgatcaagaacacgcctgtacctgcggatcctccgaccaccttcaaccagtcaaagctgaactctttcatcacgcaatacagcaccggacaggtcagcgtggaaattgaatgggagctgcagaaggaaaacagcaagcgctggaaccccgagatccagtacacctccaactactacaaatctacaagtgtggactttgctgttaatacagaaggcgtgtactctgaaccccaccccattggcacccgttacctcacccgtcccctgtaa

SEQ ID NO: 1025 - DNA, 2211 bp, Artificial Sequence
  Description of Artificial Sequence: Synthetic polynucleotide
atggctgccgatggttatcttccagattggctcgaggacactctctctgaaggaataagacagtggtggaagctcaaacctggcccaccaccaccaaagcccgcagagcggcacaaggacgacagcaggggtcttgtgcttcctgggtacaagtacctcggacccttcaacggactcgacaagggagagccggtcaacgaggcagacgccgcggccctcgagcacgacaaagcctacgaccggcagctcgacagcggagacaacccgtacctcaagtacaaccacgccgacgcggagtttcaggagcgccttaaagaagatacgtcttttgggggcaacctcggacgagcagtcttccaggcgaaaaagagggttcttgaacctctgggcctggttgaggaacctgttaagacggctccgggaaaaaagaggccggtagagcactctcctgtggagccagactcctcctcgggaaccggaaaggcgggccagcagcctgctaaaaagagactcaattttggtcagactggcgactcagagtcagtccccgacccacaacctctcggagaacctccagcaacccccgctgctgtgggacctactacaatggcttcaggtggtggcgcaccaatggcagacaataacgaaggcgccgacggagtgggtaatgcctcaggaaattggcattgcgattccacatggctgggcgacagagtcatcaccaccagcacccgcacctgggccttgcccacctacaataaccacctctacaagcaaatctccagtgcttcaacgggggccagcaacgacaaccactacttcggctacagcaccccctgggggtattttgacttcaacagattccactgccacttctcaccacgtgactggcagcgactcatcaacaacaactggggattccggcccaagagactcaacttcaaactcttcaacatccaagtcaaggaggtcacgcagaatgaaggcaccaagaccatcgccaataacctcaccagcaccatccaggtgtttacggactcggagtaccagctgccgtacgttctcggctctgcccaccagggctgcctgcctccgttcccggcggacgtgttcatgattccccagtacggctacctaacactcaacaacggtagtcaggccgtgggacgctcctccttctactgcctggaatactttccttcgcagatgctgagaaccggcaacaacttccagtttacttacaccttcgaggacgtgcctttccacagcagctacgcgcacagccagagcttggaccggctgatgaatcctctgattgaccagtacctgtactacttgtctcggactcaaacaacaggaggcacggcaaatacgcagactctgggcttcagccaaggtgggcctaatacaatggccaatcaggcaaagaactggctgccaggaccctgttaccgccaacaacgcgtctcaacgacaaccgggcaaaacaacaatagcaactttgcctggactgctgggaccaaataccatctgaatggaagaaattcattggctaatcctggcatcgctatggcaacacacaaagacgacaaggagcgtttttttcccagtaacgggatcctgatttttggcaaacaaaatgctgccagagacaatgcggattacagcgatgtcatgctcaccagcgaggaagaaatcaaaaccactaaccctgtggctacagaggaatacggtatcgtggcagataacttgcagcagcaaaacacggctcctcaaattggaactgtcaacagccagggggccttacccggtatggtctggcagaaccgggacgtgtacctgcagggtcccatctgggccaagattcctcacacggacggcaacttccacccgtctccgctgatgggcggctttggcctgaaacatcctccgcctcagatcctgatcaagaacacgcctgtacctgcggatcctccgaccaccttcaaccagtcaaagctgaactctttcatcacgcaatacagcaccggacaggtcagcgtggaaattgaatgggagctgcagaaggaaaacagcaagcgctggaaccccgagatccagtacacctccaactactacaaatctacaagtgtggactttgctgttaatacagaaggcgtgtactctgaaccccaccccattggcacccgttacctcacccgtcccctgtaa

SEQ ID NO: 1026 - DNA, 2211 bp, Artificial Sequence
  Description of Artificial Sequence: Synthetic polynucleotide
atggctgccgatggttatcttccagattggctcgaggacaacctctctgagggcattcgcgagtggtgggcgctgaaacctggagccccgaagcccaaagccaaccagcaaaagcaggacgacggccggggtctggtgcttcctggctacaagtacctcggacccttcaacggactcgacaagggggagcccgtcaacgcggcggatgcagcggccctcgagcacgacaaggcctacgaccagcagctccaagcgggtgacaatccgtacctgcggtataaccacgccgacgccgagtttcaggagcgtcttcaaggagatacgtcttttgggggcaacctcggacgagcagtcttccaggccaagaagcgggttctcgaacctctcggtctggttgaggaaggcgctaagacggctcctggaaagaaacgtccggtagagcagtcgccacaagagccagactcctcctcgggcatcggcaagacaggccagcagcccgctaaaaagagactcaattttggtcagactggcgactcagagtcagtccccgacccacaacctctcggagaacctccagcaacccccgctgctgtgggacctactacaatggcttcaggcggtggcgcaccaatggcggacaataacgaaggcgccgatggagtgggtaatgcctcaggaaattggcattgcgattccacatggctgggcgacagagtcatcaccaccagcacccgcacctgggccttgcccacctacaataaccacctctacaagcaaatctccagtgcttcaacgggggccagcaacgacaaccactacttcggctacagcaccccctgggggtattttgacttcaacagattccactgccacttctcaccacgtgactggcagcgactcatcaacaacaactggggattccggcctaagcgactcaacttcaagctcttcaacattcaggtcaaagaggttacggacaacaatggagtcaagaccatcgccaataacctcaccagcaccatccaggtgtttacggactcggagtaccagctgccgtacgttctcggctctgcccaccagggctgcctgcctccgttcccggcggacgtgttcatgattccccagtacggctacctaacactcaacaacggtagtcaggccgtgggacgctcctccttctactgcctggaatactttccttcgcagatgctgagaaccggcaacaacttccagtttacttacaccttcgaggacgtgcctttccacagcagctacgcccacagccagagcttggaccggctgatgaatcctctgattgaccagtacctgtactacttgtctcggactcaaacaacaggaggcacggcaaatacgcagactctgggcttcagccaaggtgggcctaatacaatggccaatcaggcaaagaactggctgccaggaccctgttaccgccaacaacgcgtctcaacgacaaccgggcaaaacaacaatagcaactttgcctggactgctgggaccaaataccatctgaatggaagaaattcattggctaatcctggcatcgctatggcaacacacaaagacgacaaggagcgtttttttcccagtaacgggatcctgatttttggcaaacaaaatgctgccagagacaatgcggattacagcgatgtcatgctcaccagcgaggaagaaatcaaaaccactaaccctgtggctacagaggaatacggtatcgtggcagataacttgcagcagcaaaacacggctcctcaaattggaactgtcaacagccagggggccttacccggtatggtctggcagaaccgggacgtgtacctgcagggtcccatctgggccaagattcctcacacggacggcaacttccacccgtctccgctgatgggcggctttggcctgaaacatcctccgcctcagatcctgatcaagaacacgcctgtacctgcggatcctccgaccaccttcaaccagtcaaagctgaactctttcatcacgcaatacagcaccggacaggtcagcgtggaaattgaatgggagctgcagaaggaaaacagcaagcgctggaaccccgagatccagtacacctccaactactacaaatctacaagtgtggactttgctgttaatacagaaggcgtgtactctgaaccccaccccattggcacccgttacctcacccgtcccctgtaa

SEQ ID NO: 1027 - DNA, 2217 bp, Artificial Sequence
  Description of Artificial Sequence: Synthetic polynucleotide
atggctgccgatggttatcttccagattggctcgaggacactctctctgaaggaataagacagtggtggaagctcaaacctggcccaccaccaccaaagcccgcagagcggcataaggacgacagcaggggtcttgtgcttcctgggtacaagtacctcggacccttcaacggactcgacaagggggagcccgtcaacgcggcggatgcagcggccctcgagcacgacaaggcctacgaccagcagctcaaagcgggtgacaatccgtacctgcggtataaccacgccgacgcggagtttcaggagcgccttaaagaagatacgtcttttgggggcaacctcggacgagcagtcttccaggcgaaaaagagggttcttgaacctctcggtctggttgaggaaggcgctaagacggctcctggaaagaagagaccggtagagccatcaccccagcgttctccagactcctctacgggcatcggcaagaaaggccaacagcccgccagaaaaagactcaattttggtcagactggcgactcagagtcagttccagaccctcaacctctcggagaacctccagcagcgccctctggtgtgggacctaatacaatggctgcaggcggtggcgcaccaatggcagacaataacgaaggcgccgacggagtgggtagttcctcgggaaattggcattgcgattcccaatggctgggggacagagtcatcaccaccagcaccagaacctgggccctgcccacctacaacaatcacctctacaagcaaatctccaacagcacatctggaggatcttcaaatgacaacgcctacttcggctacagcaccccctgggggtattttgacttcaaccgcttccactgccacttctcaccacgtgactggcagcgactcatcaacaacaactggggattccggcccaagagactcaacttcaagctcttcaacattcaggtcaaagaggttacggacaacaatggagtcaagaccatcgccaataaccttaccagcacggtccaggtctttacggactcggagtaccagttgccgtacgtcctcggctctgcgcaccagggctgcctccctccgttcccggcggacgtgttcatgattccccagtacggctacctaacactcaacaacggtagtcaggccgtgggacgctcctccttctactgcctggaatatttcccttctcagatgctgagaacgggcaacaactttaccttcagctacacctttgaggacgttcctttccacagcagctacgctcacagccagagtctggaccgtctcatgaatcctctgattgaccagtacctgtactacttgtctcggactcaaacaacaggaggcacggcaaatacgcagactctgggcttcagccaaggtgggcctaatacaatggccaatcaggcaaagaactggctgccaggaccctgttaccgccaacaacgcgtctcaacgacaaccgggcaaaacaacaatagcaactttgcctggactgctgggaccaaataccatctgaatggaagaaattcattggctaatcctggcatcgctatggcaacacacaaagacgacaaggagcgtttttttcccagtaacgggatcctgatttttggcaaacaaaatgctgccagagacaatgcggattacagcgatgtcatgctcaccagcgaggaagaaatcaaaaccactaaccctgtggctacagaggaatacggtatcgtggcagataacttgcagcagcaaaacacggctcctcaaattggaactgtcaacagccagggggccttacccggtatggtctggcagaaccgggacgtgtacctgcagggtcccatctgggcaaagattccacacacggacggacattttcacccctctcccctcatgggtggattcggacttaaacaccctcctccacagattctcatcaagaacaccccggtacctgcgaatcctccgaccaccttcaaccagtcaaagctgaactctttcatcacgcaatacagcacaggacaagtgagtgtggaaattgaatgggagctgcagaaagaaaacagcaagcgctggaatcccgaagtgcagtacacatccaattatgcaaaatctgccaacgttgattttactgtggacaacaatggactttatactgagcctcgccccattggcacccgttaccttacccgtcccctgtaa

SEQ ID NO: 1028 - DNA, 2211 bp, Artificial Sequence
  Description of Artificial Sequence: Synthetic polynucleotide
atggctgccgatggttatcttccagattggctcgaggacaacctctctgagggcattcgcgagtggtgggcgctgaaacctggagccccgaaacccaaagccaaccagcaaaagcaggacgacggccggggtctggtgcttcctggctacaagtacctcggacccttcaacggactcgacaagggggagcccgtcaacgcggcggacgcagcggccctcgagcacgacaaggcctacgaccagcagctcaaggcgggtgacaatccgtacctgcggtataaccacgccgacgccgagtttcaggagcgtctgcaagaagatacgtcttttgggggcaacctcgggcgagcagtcttccaggccaaaaagaggcttcttgaacctcttggtctggttgaggaaggggctaagacggctcctggaaagaaacgtccggtagagcagtcgccacaagagccagactcctcctcgggcattggcaagacaggccagcagcccgctaaaaagagactcaactttgggcagactggcgactcagagtcagtgcccgatcctcaacctctcggagaacctccagcaacccccgctgctgtgggacctactacaatggcttcaggcggtggcgcaccaatggcggacaataacgaaggcgccgatggagtgggtaattcctcgggaaattggcattgcgattccacatggatgggcgacagagtcatcaccaccagcacccgaacctgggccctgcccacctacaacaatcacctctacaagcaaatctccagtgcttcaacgggggccagcaacgacaaccactacttcggctacagcaccccctgggggtattttgatttcaacagattccactgccatttttcaccacgtgactggcagcgactcatcaacaacaactggggattccggcccaagagactcaacttcaagctcttcaacatccaggtcaaggaggtcacgcagaatgaaggcaccaagaccatcgccaataaccttaccagcacgattcaggtctttacggattcggaataccagctcccgtacgtcctcggctctgcgcaccagggctgcctccctccgttcccggcggacgtgttcattattccgcagtacggctacctaacgctcaacaatggtagccaggcagtgggacggtcatccttttactgcctggaatatttcccatcgcagatgctgagaacgggcaacaactttaccttcagctacacctttgaggacgttcctttccacagcagctacgctcacagccagagtctggaccgtctcatgaatcctctgattgaccagtacctgtactacttgtctcggactcaaacaacaggaggcacggcaaatacgcagactctgggcttcagccaaggtgggcctaatacaatggccaatcaggcaaagaactggctgccaggaccctgttaccgccaacaacgcgtctcaacgacaaccgggcaaaacaacaatagcaactttgcctggactgctgggaccaaataccatctgaatggaagaaattcattggctaatcctggcatcgctatggcaacacacaaagacgacaaggagcgtttttttcccagtaacgggatcctgatttttggcaaacaaaatgctgccagagacaatgcggattacagcgatgtcatgctcaccagcgaggaagaaatcaaaaccactaaccctgtggctacagaggaatacggtatcgtggcagataacttgcagcagcaaaacacggctcctcaaattggaactgtcaacagccagggggccttacccggtatggtctggcagaaccgggacgtgtacctgcagggtcccatctgggccaagattcctcacacggacggcaacttccacccgtctccgctgatgggcggctttggcctgaaacatcctccgcctcagatcctgatcaagaacacgccagtacctgcggatcctccgaccaccttcaaccagtcaaagctgaactctttcatcacgcaatacagcaccggacaggtcagcgtggaaattgaatgggagctgcagaaggaaaacagcaagcgctggaaccccgagatccagtacacctccaactactacaaatctacaagtgtggactttgctgttaatacagaaggcgtgtactctgaaccccaccccattggcacccgttacctcacccgtcccctgtaa

SEQ ID NO: 1029 - DNA, 2211 bp, Artificial Sequence
  Description of Artificial Sequence: Synthetic polynucleotide
atggctgccgatggttatcttccagattggctcgaggacaacctctctgagggcattcgcgagtggtgggcgctgaaacctggagccccgaaacccaaagccaaccagcaaaagcaggacgacggccggggtctggtgcttcctggctacaagtacctcggacccttcaacggactcgacaagggggagcccgtcaacgcggcggatgcagcggccctcgagcacgacaaggcctacgaccagcagctcaaggcgggtgacaatccgtacctgcggtataaccacgccgacgccgagtttcaggagcgtctgcaagaagatacgtcttttgggggcaacctcgggcgagcagtcttccaggccaaaaagagggttcttgaaccttttggtctggttgaggaagctgctaagacggctcctggaaagaaacgtccggtagagcagtcgccacaagagccagactcctcctcgggcattggcaagacaggccagcagcccgctaaaaagagactcaattttggtcagactggcgactcagagtcagtgcccgaccctcaacctctcggagaacctccagcaacccccgctgctgtgggacctactacaatggcttcaggcggtggcgcaccaatggcagacaataacgaaggcgccgatggagtgggtaatgcctcaggaaattggcattgcgattccacatggctgggcgacagagtcatcaccaccagcacccgaacctgggccctgcccacctacaacaatcacctctacaagcaaatctccagtgcttcaacgggggccagcaacgacaaccactacttcggctacagcaccccctgggggtattttgactttaacagattccactgccacttttcaccacgtgactggcagcgactcatcaacaacaactggggattccggcccaagagactcaacttcaagctcttcaacatccaggtcaaggaggtcacgcagaatgaaggcaccaagaccatcgccaataacctcaccagcaccattcaggtctttacggattcggaataccagctcccgtacgtcctcggctctgcccaccagggctgcctccctccgttcccggcggacgtgttcatgattccgcagtacggctacctaacgctcaacaatggtagccaggcagtgggacggtcatccttttactgcctggaatatttcccatcgcagatgctgagaacgggcaacaactttaccttcagctacacctttgaggacgttcctttccacagcagctacgctcacagccagagtctggaccgtctcatgaatcctctgattgaccagtacctgtactacttgtctcggactcaaacaacaggaggcacggcaaatacgcagactctgggcttcagccaaggtgggcctaatacaatggccaatcacgcaaagaactggctgccaggaccctgttaccgccaacaacgcgtctcaacgacaaccgggcaaaacaacaatagcaactttgcctggactgctgggaccaaataccatctgaatggaagaaattcattggctaatcctggcatcgctatggcaacacacaaagacgacaaggagcgtttttttcccagtaacgggatcctgatttttggcaaacaaaatgctgccagagacaatgcggattacagcgatgtcatgctcaccagcgaggaagaaatcaaaaccactaaccctgtggctacagaggaatacggtatcgtggcagataacttgcagcagcaaaacacggctcctcaaattggaactgtcaacagccagggggccttacccggtatggtctggcagaaccgggacgtgtacctgcagggtcccatctgggccaagattcctcacacggacggcaacttccacccgtctccgctgatgggcggctttggcctgaaacatcctccgcctcagatcctgatcaagaacacgcctgtacctgcggatcctccgaccaccttcaaccagtcaaagctgaactctttcatcacgcaatacagcaccggacaggtcagcgtggaaattgaatgggagctgcagaaggaaaacagcaagcgctggaaccccgagatccagtacacctccaactactacaaatctacaagtgtggactttgctgttaatacagaaggcgtgtactctgaaccccaccccattggcacccgttacctcacccgtcccctgtaa

SEQ ID NO: 1030 - DNA, 2211 bp, Artificial Sequence
  Description of Artificial Sequence: Synthetic polynucleotide
atggctgccgatggttatcttccagattggctcgaggacaacctctctgagggcattcgcgagtggtgggcgctgaaacctggagccccgaagcccaaagccaaccagcaaaagcaggacgacggccggggtctggtgcttcctggctacaagtacctcggacccttcaacggactcgacaaaggagagcccgtcaacgaggcggacgcggcggccctcgaacacgacaaggcttacgaccagcagctcaaggccggtgacaacccctacctgcggtacaaccacgccgacgccgagttccaggagcggctgcaagaagatacgtcttttgggggcaacctcgggcgagcagtcttccaggccaagaagaggcttcttgaacctcttggtctggttgaggaagcggctaagacggctcctggaaagaagaggcctgtagagcagtctcctcaggaaccggactcctccgcgggtattggcaaatcaggtgcacagcccgctaaaaagagactcaattttggtcagactggcgactcagagtcagtccccgacccacaacctctcggagaacctccagcaacccccgctgctgtgggacctactacaatggcttcaggcggtggcgcaccaatggcagacaataacgaaggcgccgatggagtgggtaatgcctcaggaaattggcattgcgattccacatggctgggcgacagagtcatcaccaccagcacccgaacctgggccctgcccacctataacaaccatctctacaagcaaatctccagtgcttcaacgggggccagtaacgacaaccactacttcggctacagcaccccctgggggtattttgactttaacagattccactgccacttctcaccacgtgactggcagcgactcatcaacaacaactggggattccggcccaagcgactcaacttcaagctcttcaacattcaggtcaaagaggttacggacaacgatggagtcaagaccatcgccaataaccttaccagcaccattcaggtgtttacggactcggaataccagctgccgtacgttctcggctccgcccaccagggctgcctgcctccgttcccggcggacgtgttcatgattccccagtacggctacctaacactcaacaacggtagtcaggccgtgggacgctcctccttctactgcctggaatactttccttcgcagatgctgagaactggcaacaacttccagtttacttacaccttcgaggacgtgcctttccacagcagctacgcccacagccagagcttggaccggctgatgaatcctctgattgaccagtacctgtactacttgtctcggactcaaacaacaggaggcacggcaaatacgcagactctgggcttcagccaaggtgggcctaatacaatggccaatcaggcaaagaactggctgccaggaccctgttaccgccaacaacgcgtctcaacgacaaccgggcaaaacaacaatagcaactttgcctggactgctgggaccaaataccatctgaatggaagaaattcattggctaatcctggcatcgctatggcaacacacaaagacgacaaggagcgtttttttcccagtaacgggatcctgatttttggcaaacaaaatgctgccagagacaatgcggattacagcgatgtcatgctcaccagcgaggaagaaatcaaaaccactaaccctgtggctacagaggaatacggtatcgtggcagataacttgcagcagcaaaacacggctcctcaaattggaactgtcaacagccagggggccttacccggtatggtctggcagaaccgggacgtgtacctgcagggtcccatctgggccaagattcctcacacggacggcaacttccacccgtctccgctgatgggcggctttggcctgaaacatcctccgcctcagatcctgatcaagaacacgcctgtacctgcggatcctccgaccaccttcaaccagtcaaagctgaactctttcatcacgcaatacagcaccggacaggtcagcgtggaaattgaatgggagctgcagaaggaaaacagcaagcgctggaaccccgagatccagtacacctccaactactacaaatctacaagtgtggactttgctgttaatacagaaggcgtgtactctgaaccccaccccattggcacccgttacctcacccgtcccctgtaa

SEQ ID NO: 1031 - DNA, 2211 bp, Artificial Sequence
  Description of Artificial Sequence: Synthetic polynucleotide
atggctgccgatggttatcttccagattggctcgaggacaacctctctgagggcattcgcgagtggtgggcgctgaaacctggagccccgaagcccaaagccaaccagcaaaagcaggacgacggccggggtctggtgcttcctggctacaagtacctcggacccttcaacggactcgacaagggggagcccgtcaacgcggcggatgcagcggccctcgagcacgacaaagcctacgaccagcagctcaaagcgggtgacaatccgtacctgcggtataaccacgccgacgccgagtttcaggagcgtctgcaagaagatacgtcttttgggggcaacctcgggcgagcagtcttccaggccaagaagagggttctcgaacctttgggtctggttgaggaaggggctaagacggctcctggaaagaaaaggccggtagagcagtctcctcaggaaccggactcctccgcgggtattggcaagacaggtgcacagcccgctaaaaagagactcaattttggtcagactggcgactcagagtcagtccccgacccacaacctctcggagaacctccagcaacccccgctgctgtgggacctactacaatggcttcaggcggtggcgcaccaatggcagacaataacgaaggcgccgacggagtgggtagtgcctcgggaaattggcattgcgattccacatggctgggcgacagagtcatcaccaccagcacccgaacctgggccctgcccacctataacaaccatctctacaagcaaatctccagtgcttcaacgggggccagtaacgacaaccactacttcggctacagcaccccctgggggtattttgacttcaacagattccactgccacttctcaccacgtgactggcagcgactcatcaacaacaactggggattccggcccaagcgactcaacttcaagctcttcaacattcaggtcaaagaggttacggacaacaatggagtcaagaccatcgccaataaccttaccagcacgatccaggtctttacggactcggagtaccagctgccgtacgtcctcggctctgcgcaccagggctgcctgcctccgttcccggcggacgtgttcatgattccgcagtacggctacctaacgctcaacaatggtagccaggcagtgggacggtcatccttttactgcctggaatatttcccatcgcagatgctgagaacgggcaacaactttaccttcagctacacctttgaggacgttcctttccacagcagctacgctcacagccagagtctggaccgtctcatgaatcctctgattgaccagtacctgtactacttgtctcggactcaaacaacaggaggcacggcaaatacgcagactctgggcttcagccaaggtgggcctaatacaatggccaatcaggcaaagaactggctgccaggaccctgttaccgccaacaacgcgtctcaacgacaaccgggcaaaacaacaatagcaactttgcctggactgctgggaccaaataccatctgaatggaagaaattcattggctaatcctggcatcgctatggcaacacacaaagacgacaaggagcgtttttttcccagtaacgggatcctgatttttggcaaacaaaatgctgccagagacaatgcggattacagcgatgtcatgctcaccagcgaggaagaaatcaaaaccactaaccctgtggctacagaggaatacggtatcgtggcagataacttgcagcagcaaaacacggctcctcaaattggaactgtcaacagccagggggccttacccggtatggtctggcagaaccgggacgtgtacctgcagggtcccatctgggccaagattcctcacacggacggcaacttccacccgtctccgctgatgggcggctttggcctgaaacatcctccgcctcagatcctgatcaagaacacgcctgtacctgcggatcctccgaccaccttcaaccagtcaaagctgaactctttcatcacgcaatacagcaccggacaggtcagcgtggaaattgaatgggagctgcagaaggaaaacagcaagcgctggaaccccgagatccagtacacctccaactactacaaatctacaagtgtggactttgctgttaatacagaaggcgtgtactctgaaccccaccccattggcacccgttacctcacccgtcccctgtaa

SEQ ID NO: 1032 - DNA, 2211 bp, Artificial Sequence
  Description of Artificial Sequence: Synthetic polynucleotide
atggctgccgatggttatcttccagattggctcgaggacaacctctctgagggcattcgcgagtggtgggacttgaaacctggagccccgaagcccaaagccaaccagcaaaagcaggacgacggccggggtctggtgcttcctggctacaagtacctcggacccttcaacggactcgacaagggggagcccgtcaacgcggcggacgcagcggccctcgagcacgacaaggcctacgaccagcagctcaaagcgggtgacaatccgtacctgcggtataaccacgccgacgccgagtttcaggagcgtctgcaagaagatacgtcttttgggggcaacctcggacgagcagtcttccaggccaaaaagaggcttcttgaacctcttggtctggttgaggaagcggctaagacggctcctggaaagaagaggcctgtagagcagtctcctcaggaaccggactcctccgcgggtattggcaaatcgggtgcacagcccgctaaaaagagactcaatttcggtcagactggcgacacagagtcagtcccagaccctcaaccaatcggagaacctccagcagcgccctctggtgtgggacctaatacaatggctgcaggcggtggcgcaccaatggcagacaataacgaaggtgccgatggagtgggtagttcctcgggaaattggcattgcgattcccaatggctgggggacagagtcatcaccaccagcacccgaacctgggccctgcccacctataacaaccacctctacaagcaaatctccagtgcttcaacgggggccagcaacgacaaccactactttggctacagcaccccttgggggtattttgacttcaacagattccactgccacttttcaccacgtgactggcaaagactcatcaacaacaactggggattccgacccaagagactcaacttcaagctcttcaacatccaggtcaaggaggtcacgcagaatgaaggcaccaagaccatcgccaataacctcaccagcaccatccaggtgtttacggactcggagtaccagctgccgtacgttctcggctctgcccaccagggctgcctgcctccgttcccggcggacgtgttcatgattccccagtacggctacctaacactcaacaacggtagtcaggccgtgggacgctcctccttctactgcctggaatactttccttcgcagatgctgagaaccggcaacaacttccagtttacttacaccttcgaggacgtgcctttccacagcagctacgcgcacagccagagcttggaccggctgatgaatcctctgattgaccagtacctgtactacttgtctcggactcaaacaacaggaggcacggcaaatacgcagactctgggcttcagccaaggtgggcctaatacaatggccaatcacgcaaagaactggctgccaggaccctgttaccgccaacaacgcgtctcaacgacaaccgggcaaaacaacaatagcaactttgcctggactgctgggaccaaataccatctgaatggaagaaattcattggctaatcctggcatcgctatggcaacacacaaagacgacaaggagcgtttttttcccagtaacgggatcctgatttttggcaaacaaaatgctgccagagacaatgcggattacagcgatgtcatgctcaccagcgaggaagaaatcaaaaccactaaccctgtggctacagaggaatacggtatcgtggcagataacttgcagcagcaaaacacggctcctcaaattggaactgtcaacagccagggggccttacccggtatggtctggcagaaccgggacgtgtacctgcagggtcccatctgggccaagattcctcacacggacggcaacttccacccgtctccgctgatgggcggctttggcctgaaacatcctccgcctcagatcctgatcaagaacacgcctgtacctgcggatcctccgaccaccttcaaccagtcaaagctgaactctttcatcacgcaatacagcaccggacaggtcagcgtggaaattgaatgggagctgcagaaggaaaacagcaagcgctggaaccccgagatccagtacacctccaactactacaaatctacaagtgtggactttgctgttaatacagaaggcgtgtactctgaaccccaccccattggcacccgttacctcacccgtcccctgtaa

SEQ ID NO: 1033 - DNA, 2214 bp, Artificial Sequence
  Description of Artificial Sequence: Synthetic polynucleotide
atggctgccgatggttatcttccagattggctcgaggacaaccttagtgaaggaattcgcgagtggtgggcgctgaaacctggagccccgaagcccaaagccaaccagcaaaagcaggacgacggccggggtctggtgcttcctggctacaagtacctcggacccttcaacggactcgacaagggggagcccgtcaacgcggcggacgcagcggccctcgagcacgacaaggcctacgaccagcagctcaaagcgggtgacaatccgtacctgcggtataaccacgccgacgccgagtttcaggagcgtctgcaagaagatacgtcttttgggggcaacctcgggcgagcagtcttccaggccaagaagcgggttctcgaacctctcggtctggttgaggaaggcgctaagacggctcctggaaagaaacgtccggtagagcagtcgccacaagagccagactcctcctcgggcatcggcaagacaggccagcagcccgctaaaaagagactcaatttcggtcagactggcgacacagagtcagtcccagaccctcaaccaatcggagaacctcccgcagccccctcaggtgtgggatctcttacaatggcttcaggtggtggcgcaccagtggcagacaataacgaaggtgccgatggagtgggtagttcctcgggaaattggcattgcgattcccaatggctgggggacagagtcatcaccaccagcaccagaacctgggccttgcccacctacaataaccacctctacaagcaaatctccaacagcacatctggaggatcttcaaatgacaacgcctacttcggctacagcaccccctgggggtattttgactttaacagattccactgccacttttcaccacgtgactggcagcgactcatcaacaacaactggggattccgacccaagagactcaacttcaagctcttcaacatccaggtcaaggaggtcacgcagaacgaaggcaccaagaccatcgccaataacctcaccagcaccatccaggtgtttacggactcggagtaccagctgccgtacgttctcggctccgcccaccagggctgcctgcctccgttcccggcggacgtgttcatgattccccagtacggctacctaacgctcaacaacggtagtcaggccgtgggacgctcctccttctactgcctggaatactttccttcgcagatgctgagaaccggcaacaacttccagtttacttacaccttcgaggacgtgcctttccacagcagctacgcgcacagccagagcttggaccggctgatgaatcctctgattgaccagtacctgtactacttgtctcggactcaaacaacaggaggcacggcaaatacgcagactctgggcttcagccaaggtgggcctaatacaatggccaatcaggcaaagaactggctgccaggaccctgttaccgccaacaacgcgtctcaacgacaaccgggcaaaacaacaatagcaactttgcctggactgctgggaccaaataccatctgaatggaagaaattcattggctaatcctggcatcgctatggcaacacacaaagacgacaaggagcgtttttttcccagtaacgggatcctgatttttggcaaacaaaatgctgccagagacaatgcggattacagcgatgtcatgctcaccagcgaggaagaaatcaaaaccactaaccctgtggctacagaggaatacggtatcgtggcagataacttgcagcagcaaaacacggctcctcaaattggaactgtcaacagccagggggccttacccggtatggtctggcagaaccgggacgtgtacctgcagggtcccatctgggccaagattcctcacacggacggcaacttccacccgtctccgctgatgggcggctttggcctgaaacatcctccgcctcagatcctgatcaagaacacgcctgtacctgcggatcctccgaccaccttcaaccagtcaaagctgaactctttcatcacgcaatacagcaccggacaggtcagcgtggaaattgaatgggagctgcagaaggaaaacagcaagcgctggaaccccgagatccagtacacctccaactactacaaatctacaagtgtggactttgctgttaatacagaaggcgtgtactctgaaccccaccccattggcacccgttacctcacccgtcccctgtaa

SEQ ID NO: 1034 - DNA, 2214 bp, Artificial Sequence
  Description of Artificial Sequence: Synthetic polynucleotide
atggctgccgatggttatcttccagattggctcgaggacaaccttagtgaaggaattcgcgagtggtgggcgctgaaacctggagccccgaagcccaaagccaaccagcaaaagcaggacgacggccggggtctggtgcttcctggctacaagtacctcggacccttcaacggactcgacaagggggagcccgtcaacgcggcggacgcagcggccctcgagcacgacaaggcctacgaccagcagctcaaagcgggtgacaatccgtacctgcggtataaccacgccgacgcggagtttcaggagcgccttaaagaagatacgtcttttgggggcaacctcgggcgagcagtcttccaggccaagaagagggttctcgaaccttttggtctggttgaggaaggtgctaagacggctcctggaaagaaacgtccggtagagcagtcgccacaagagccagactcctcctcgggcatcggcaagacaggccagcagcccgctaaaaagagactcaattttggtcagactggcgactcagagtcagttccagaccctcaacctctcggagaacctccagcagcgccctctggtgtgggacctaatacaatggctgcaggcggtggcgcaccaatggcagacaataacgaaggtgccgatggagtgggtagttcctcgggaaattggcattgcgattcccaatggctggggaacagagtcatcaccaccagcacccgaacctgggccctgcccacctacaacaatcacctctacaagcaaatctccaacagcacatctggaggatcttcaaatgacaacgcctacttcggctacagcaccccctgggggtattttgacttcaacagattccactgccacttctcaccacgtgactggcagcgactcatcaacaacaactggggattccggcccaagagactcaacttcaagctcttcaacattcaggtcaaagaggttacggacaacaatggagtcaagaccatcgccaataaccttaccagcacggtccaggtcttcacggactcggagtaccagttgccgtacgtcctcggctctgcgcaccagggctgcctccctccgttcccggcggacgtgttcatgattccgcaatacggctacctgacgctcaacaacggtagccaagccgtgggacgttcatccttttactgcctggaatatttcccttctcagatgctgagaaccggcaacaacttccagtttacttacaccttcgaggacgtgcctttccacagcagctacgcgcacagccagagcttggaccggctgatgaatcctctgattgaccagtacctgtactacttgtctcggactcaaacaacaggaggcacggcaaatacgcagactctgggcttcagccaaggtgggcctaatacaatggccaatcaggcaaagaactggctgccaggaccctgttaccgccaacaacgcgtctcaacgacaaccgggcaaaacaacaatagcaactttgcctggactgctgggaccaaataccatctgaatggaagaaattcattggctaatcctggcatcgctatggcaacacacaaagacgacaaggagcgtttttttcccagtaacgggatcctgatttttggcaaacaaaatgctgccagagacaatgcggattacagcgatgtcatgctcaccagcgaggaagaaatcaaaaccactaaccctgtggctacagaggaatacggtatcgtggcagataacttgcagcagcaaaacacggctcctcaaattggaactgtcaacagccagggggccttacccggtatggtctggcagaaccgggacgtgtacctgcagggtcccatctgggccaagattcctcacacggacggcaacttccacccgtctccgctgatgggcggctttggcctgaaacatcctccgcctcagatcctgatcaagaacacgcctgtacctgcggatcctccgaccaccttcaaccagtcaaagctgaactctttcatcacgcaatacagcaccggacaggtcagcgtggaaattgaatgggagctgcagaaggaaaacagcaagcgctggaaccccgagatccagtacacctccaactactacaaatctacaagtgtggactttgctgttaatacagaaggcgtgtactctgaaccccaccccattggcacccgttacctcacccgtcccctgtaa

SEQ ID NO: 1035 - DNA, 2211 bp, Artificial Sequence
  Description of Artificial Sequence: Synthetic polynucleotide
atggctgccgatggttatcttccagattggctcgaggacaacctctctgagggcattcgcgagtggtgggacttgaaacctggagccccgaagcccaaagccaaccagcaaaagcaggacgacggccggggtctggtgcttcctggctacaagtacctcggacccttcaacggactcgacaggggggagcccgtcaacgcggcggacgcagcggccctcgagcacgacaaggcctacgaccagcagctcaaagcgggtgacaatccgtacctgcggtataaccacgccgacgccgagtttcaggagcgtctgcaagaagatacgtcttttgggggcaacctcgggcgagcagtcttccaggccaagaagcgggttctcgaacctctcggtctggttgaggaaggcgctaagacggctcctggaaagaaacgtccggtagagcagtcgccacaagagccagactcctcctcgggcatcggcaagacaggccagcagcccgctaaaaagagactcaattttggtcagactggcgactcagagtcagtccccgacccacaacctctcggagaacctccagcaacccccgctgctgtgggacctactacaatggcttcaggcggtggcgcaccaatggcagacaataacgaaggcgccgacggagtgggtaatgcctcaggaaattggcattgcgattccacatggctgggcgacagagtcatcaccaccagcacccgaacctgggccttgcccacctataacaaccacctctacaagcaaatctccagtgcttcaacgggggccagcaacgacaaccactacttcggctacagcaccccctgggggtattttgacttcaacagattccactgccacttctcaccacgtgactggcagcgactcatcaacaacaactggggattccggcctaagcgactcaacttcaagctcttcaacattcaggtcaaagaggttacggacaacaatggagtcaagaccatcgccaataacctcaccagcaccatccaggtgtttacggactcggagtaccagctgccgtacgttctcggctctgcccaccagggctgcctgcctccgttcccggcggacgtgttcatgattccccagtacggctacctaacactcaacaacggtagtcaggccgtgggacgctcctccttctactgcctggaatactttccttcgcagatgctgagaaccggcaacaacttccagtttacttacaccttcgaggacgtgcctttccacagcagctacgcccacagccagagcttggaccggctgatgaatcctctgattgaccagtacctgtactacttgtctcggactcaaacaacaggaggcacggcaaatacgcagactctgggcttcagccaaggtgggcctaatacaatggccaatcaggcaaagaactggctgccaggaccctgttaccgccaacaacgcgtctcaacgacaaccgggcaaaacaacaatagcaactttgcctggactgctgggaccaaataccatctgaatggaagaaattcattggctaatcctggcatcgctatggcaacacacaaagacgacaaggagcgtttttttcccagtaacgggatcctgatttttggcaaacaaaatgctgccagagacaatgcggattacagcgatgtcatgctcaccagcgaggaagaaatcaaaaccactaaccctgtggctacagaggaatacggtatcgtggcagataacttgcagcagcaaaacacggctcctcaaattggaactgtcaacagccagggggccttacccggtatggtctggcagaaccgggacgtgtacctgcagggtcccatctgggccaagattcctcacacggacggcaacttccacccgtctccgctgatgggcggctttggcctgaaacatcctccgcctcagatcctgatcaagaacacgcctgtacctgcggatcctccgaccaccttcaaccagtcaaagctgaactctttcatcacgcaatacagcaccggacaggtcagcgtggaaattgaatgggagctgcagaaggaaaacagcaagcgctggaaccccgagatccagtacacctccaactactacaaatctacaagtgtggactttgctgttaatacagaaggcgtgtactctgaaccccaccccattggcacccgttacctcacccgtcccctgtaa

SEQ ID NO: 1036 - DNA, 2211 bp, Artificial Sequence
  Description of Artificial Sequence: Synthetic polynucleotide
atggctgccgatggttatcttccagattggctcgaggacaacctctctgagggcattcgcgagtggtgggacttgaaacctggagccccgaagcccaaagccaaccagcaaaagcaggacgacggccggggtctggtgcttcctggctacaagtacctcggacccttcaacggactcgacaagggggagcccgtcaacgcggcggacgcagcggccctcgagcacgacaaggcctacgaccagcagctcaaagcgggtgacaatccgtacctgcggtataaccacgccgacgccgagtttcaggagcgtctgcaagaagatacgtcttttgggggcaacctcgggcgagcagtcttccaggccaagaagcgggttctcgaacctctcggtctggttgaggaaggcgctaagacggctcctggaaagaaacgtccggtagagcagtcgccacaagagccagactcctcctcgggcatcggcaagaaaggccaacagcccgccagaaaaagactcaattttggtcagactggcgactcagagtcagttccagaccctcaacctctcggagaacctcccgcagccccctcaggtgtgggatctcttacaatggcttcaggcggtggcgcaccaatggcagacaataacgaaggcgccgacggagtgggtaatgcctcaggaaattggcattgcgattccacatggctgggcgacagagtcatcaccaccagcacccgaacatgggccttgcccacttacaacaaccatctctacaagcaaatctccagtgcttcaacgggggccagcaacgacaaccactacttcggctacagcaccccctgggggtattttgatttcaacagattccactgccacttttcaccacgtgactggcaaagactcatcaacaacaactggggattccgacccaagagactcaacttcaagctctttaacattcaagtcaaagaggtcacgcagaatgaaggcaccaagaccatcgccaataaccttaccagcacggtccaggtcttcacggactcagactatcagctcccgtacgttctcggctccgcccaccagggctgcctgcctccgttcccggcggacgtgttcatgattccccagtacggctacctaacactcaacaacggtagtcaggccgtgggacgctcctccttctactgcctggaatactttccttcgcagatgctgagaaccggcaacaacttccagtttacttacacctttgaggacgttcctttccacagcagctacgctcacagccagagtctggaccgtctcatgaatcctctgattgaccagtacctgtactacttgtctcggactcaaacaacaggaggcacggcaaatacgcagactctgggcttcagccaaggtgggcctaatacaatggccaatcaggcaaagaactggctgccaggaccctgttaccgccaacaacgcgtctcaacgacaaccgggcaaaacaacaatagcaactttgcctggactgctggaaccaaataccatctgaatggaagaaattcattgtctaatcctggcatcgctatggcgacacacaaagacgacaaggagcgtttttttcccagtaacgggatcctgatttttggcaaacaaaatgctgccagagacaatgcggattacagcgatgtcatgctcaccagcgaggaagaaatcaaaaccactaaccctgtggctacagaggaatacggtatcgtggcagataacttgcagcagcaaaacacggctcctcaaattggaactgtcaacagccagggggccttacccggtatggtctggcagaaccgggacatgtacctgcagggtcccatctgggccaagattcctcacacggacggcaacttccacccgtctccgctgatgggcggctttggcctgaaacatcctccgcctcagatcctgatcaagaacacgcctgtacctgcggatcctccgaccaccttcaaccagtcaaagctgaactctttcatcacgcaatacagcaccggacaggtcagcgtggaaattgaatgggagctgcagaaggaaaacagcaagcgctggaaccccgagatccagtacacctccaactactacaaatctacaagtgtggactttgctgttaatacagaaggcgtgtactctgaaccccaccccattggcacccgttacctcacccgtcccctgtaa

SEQ ID NO: 1037 - DNA, 2211 bp, Artificial Sequence
  Description of Artificial Sequence: Synthetic polynucleotide
atggctgccgatggttatcttccagattggctcgaggacaacctctctgagggcattcgcgagtggtgggcgctgaaacctggagccccgaagcccaaagccaaccagcaaaagcaggacgacggccggggtctggtgcttcctggctacaagtacctcggacccttcaacggactcgacaagggggagcccgtcaacgcggcggatgcagcggccctcgagcacgacaaggcctacgaccagcagctcaaagcgggtgacaatccgtacctgcggtataaccacgccgacgccgagtttcaggagcgtctgcaggaagatacgtcttttgggggcaacctcgggcgagcagtcttccaggccaagaagagggttctcgaaccttttggtctggttgaggaaggcgctaagacggctcctggaaagaaacgtccggtagagcagtcgccacaagagccagactcctcctcgggcatcggcaagacaggccagcagcccgctaaaaagagactcaattttggtcagactggcggctcagagtcagtccccgacccacaacctctcggagaacctccagcaacccccgctgctgtgggacctactacaatggctgcaggcggtggcgcaccaatggcagacaataacgaaggcgccgacggagtgggtagttcctcgggaaattggcattgcgattccacatggctgggcgacagagtcatcaccaccagcaccagaacctgggccttgcccacctataacaaccacctctacaagcaaatctccagtgcttcaacgggggccagcaacgacaaccactacttcggctacagcaccccctgggggtattttgatttcaacagattccactgccatttctcaccacgtgactggcagcgactcatcaacaacaactggggattccggcccaagagactcaacttcaaactcttcaacattcaggtcaaagaggttacggacaacaatggagtcaagaccatcgccaataaccttaccagcacggtccaggtgtttacggactcggagtaccagctgccgtacgttctcggctctgcccaccagggctgcctccctccgttcccggcggacgtgttcatgattccgcagtacggctacctaacgctcaacaatggcagccaggcagtgggacggtcatccttttactgcctggaatatttcccttctcagatgctgagaacgggcaacaactttaccttcagctacacctttgaggaagtgcctttccacagcagctacgcgcacagccagagcctggaccggctgatgaatcctctgattgaccagtacctgtactacttgtctcggactcaaacaacaggaggcacggcaaatacgcagactctgggcttcagccaaggtgggcctaatacaatggccaatcaggcaaagaactggctgccaggaccctgttaccgccaacaacgcgtctcaacgacaaccgggcaaaacaacaatagcaactttgcctggactgctgggaccaaataccatctgaatggaagaaattcattggctaatcctggcatcgctatggcctcacacaaagacgacaaggagcgtttttttcccagtaacgggatcctgatttttggcaaacaaaatgctgccagagacaatgcggattacagcgatgtcatgctcaccagcgaggaagaaatcaaaaccactaaccctgtggctacagaggaatacggtatcgtggcagataacttgcagcagcaaaacacggctcctcaaattggaactgtcaacagccagggggccttacccggtatggtctggcagaaccgggacgtgtacctgcagggtcccatctgggccaagattcctcacacggacggcaacttccacccgtctccgctgatgggcggctttggcctgaaacatcctccgcctcagatcctgatcaagaacacgcctgtacctgcggatcctccgaccaccttcaaccagtcaaagctgaactctttcatcacgcaatacagcaccggacaggtcagcgtggaaattgaatgggagctgcagaaggaaaacagcaagcgctggaaccccgagatccagtacacctccaactactacaaatctacaagtgtggactttgctgttaatacagaaggcgtgtactctgaaccccaccccattggcacccgttacctcacccgtcccctgtaa

SEQ ID NO: 1038 - protein, 736 aa, Artificial Sequence
  Description of Artificial Sequence: Synthetic polypeptide
MAADGYLPDWLEDTLSEGIRQWWKLKPGPPPPKPAERHKDDSRGLVLPGYKYLGPFNGLDKGEPVNEADAAALEHDKAYDQQLKAGDNPYLKYNHADAEFQERLKEDTSFGGNLGRAVFQAKKRVLEPLGLVEEGAKTAPGKKRPVEQSPQEPDSSSGIGKTGQQPAKKRLNFGQTGDSESVPDPQPLGEPPATPAAVGPTTMASGGGAPMADNNEGADGVGSSSGNWHCDSQWLGDRVITTSTRTWALPTYNNHLYKQISSASTGASNDNHYFGYSTPWGYFDFNRFHCHFSPRDWQRLINNNWGFRPKRLNFKLFNIQVKEVTQNEGTKTIANNLTSTIQVFTDSEYQLPYVLGSAHQGCLPPFPADVFMIPQYGYLTLNNGSQAVGRSSFYCLEYFPSQMLRTGNNFQFTYTFEDVPFHSSYAHSQSLDRLMNPLIDQYLYYLSRTQTTGGTANTQTLGFSQGGPNTMANQAKNWLPGPCYRQQRVSTTTGQNNNSNFAWTAGTKYHLNGRNSLANPGIAMATHKDDKERFFPSNGILIFGKQNAARDNADYSDVMLTSEEEIKTTNPVATEEYGIVADNLQQQNTAPQIGTVNSQGALPGMVWQNRDVYLQGPIWAKIPHTDGNFHPSPLMGGFGLKHPPPQILIKNTPVPADPPTTFNQSKLNSFITQYSTGQVSVEIEWELQKENSKRWNPEIQYTSNYYKSTSVDFAVNTEGVYSEPHPIGTRYLTRPL

SEQ ID NO: 1039 - protein, 736 aa, Artificial Sequence
  Description of Artificial Sequence: Synthetic polypeptide
MAADGYLPDWLEDNLSEGIREWWALKPGAPKPKANQQKQDDGRGLVLPGYKYLGPFNGLDKGEPVNAADAAALEHDKAYDQQLKAGDNPYLKYNHADAEFQERLKEDTSFGGNLGRAVFQAKKRLLEPLGLVEEAAKTAPGKKRPVEQSPQEPDSSAGIGKSGAQPAKKRLNFGQTGDSESVPDPQPLGEPPATPAAVGPTTMASGGGAPMADNNEGADGVGNASGNWHCDSTWLGDRVITTSTRTWALPTYNNHLYKQISSASTGASNDNHYFGYSTPWGYFDFNRFHCHFSPRDWQRLINNNWGFRPKRLNFKLFNIQVKEVTQNEGTKTIANNLTSTIQVFTDSEYQLPYVLGSAHQGCLPPFPADVFMIPQYGYLTLNNGSQAVGRSSFYCLEYFPSQMLRTGNNFQFTYTFEDVPFHSSYAHSQSLDRLMNPLIDQYLYYLSRTQTTGGTANTQTLGFSQGGPNTMANQAKNWLPGPCYRQQRVSTTTGQNNNSNFAWTAGTKYHLNGRNSLANPGIAMATHKDDKERFFPSNGILIFGKQNAARDNADYSDVMLTSEEEIKATNPVATEEYGIVADNLQQQNTAPQIGTVNSQGALPGMVWQNRDVYLQGPIWAKIPHTDGNFHPSPLMGGFGLKHPPPQILIKNTPVPADPPTTFNQSKLNSFITQYSTGQVSVEIEWELQKENSKRWNPEIQYTSNYYKSTSVDFAVNTEGVYSEPHPIGTRYLTRPL

SEQ ID NO: 1040 - protein, 737 aa, Artificial Sequence
  Description of Artificial Sequence: Synthetic polypeptide
MAADGYLPDWLEDNLSEGIREWWDLKPGAPKPKANQQKQDDGRGLVLPGYKYLGPFNGLDKGEPVNAADAAALEHDKAYDQQLKAGDNPYLRYNHADAEFQERLQEDTSFGGNLGRAVFQAKKRVLEPLGLVEEGANTAPGKKRPVEQSPQEPDSSAGIGKSGAQPAKKRLNFGQTGDTESVPDPQPIGEPPAAPSGVGSLTMASGGGAPVADNNEGADGVGSSSGNWHCDSQWLGDRVITTSTRTWALPTYNNHLYKQISNSTSGGSSNDNAYFGYSTPWGYFDFNRFHCHFSPRDWQRLINNNWGFRPKRLNFKLFNIQVKEVTDNNGVKTIANNLTSTIQVFTDSEYQLPYVLGSAHQGCLPPFPADVFMIPQYGYLTLNNGSQAVGRSSFYCLEYFPSQMLRTGNNFQFTYTFEDVPFHSSYAHSQSLDRLMNPLIDQYLYYLSRTQTTGGTANTQTLGFSQGGPNTMANQAKNWLPGPCYRQQRVSTTTGQNNNSNFAWTAGTKYHLNGRNSLANPGIAMASHKDDKERFFPSNGILIFGKQNAARDNADYSDVMLTSEEEIKTTNPVATEEYGIVADNLQQQNTAPQIGTVNSQGALPGMVWQNRDVYLQGPIWAKIPHTDGNFHPSPLMGGFGLKHPPPQILIKNTPVPADPPTTFNQSKLNSFITQYSTGQVSVEIEWELQKENSKRWNPEIQYTTNYYKSTSVDFAVNTEGVYSEPHPIGTRYLTRPL

SEQ ID NO: 1041 - protein, 736 aa, Artificial Sequence
  Description of Artificial Sequence: Synthetic polypeptide
MAADGYLPDWLEDNLSEGIREWWALKPGAPKPKANQQKQDDGRGLVLPGYKYLGPFNGLDKGEPVNEADAAALEHDKAYDQQLKAGDNPYLRYNHADAEFQERLQEDTSFGGNLGRAVFQAKKRVLEPLGLVEEGAKTAPGKKRPVEQSPQEPDSSSGIGKTGQQPAKKRLNFGQTGDSESVPDPQPLGEPPATPAAVGPTTMASGGGAPMADNNEGADGVGNASGNWHCDSTWLGDRVITTSTRTWALPTYNNHLYKQISSASTGASNDNHYFGYSTPWGYFDFNRFHCHFSPRDWQRLINNNWGFRPKRLNFKLFNIQVKEVTQNEGTKTIANNLTSTIQVFTDSEYQLPYVLGSAHQGCLPPFPADVFMIPQYGYLTLNNGSQAVGRSSFYCLEYFPSQMLRTGNNFQFTYTFEDVPFHSSYAHSQSLDRLMNPLIDQYLYYLSRTQTTGGTANTQTLGFSQGGPNTMANQAKNWLPGPCYRQQRVSTTTGQNNNSNFAWTAGTKYHLNGRNSLANPGIAMATHKDDKERFFPSNGILIFGKQNAARDNADYSDVMLTSEEEIKTTNPVATEEYGIVADNLQQQNTAPQIGTVNSQGALPGMVWQNRDVYLQGPIWAKIPHTDGNFHPSPLMGGFGLKHPPPQILIKNTPVPADPPTTFNQSKLNSFITQYSTGQVSVEIEWELQKENSKRWNPEIQYTSNYYKSTSVDFAVNTEGVYSEPHPIGTRYLTRPL

SEQ ID NO: 1042 - protein, 736 aa, Artificial Sequence
  Description of Artificial Sequence: Synthetic polypeptide
MAADGYLPDWLEDNLSEGIREWWALKPGAPKPKANQQKQDDGRGLVLPGYKYLGPFNGLDKGEPVNEADAAALEHDKAYDQQLKAGDNPYLRYNHADAEFQERLQEDTSFGGNLGRAVFQAKKRVLEPFGLVEEGAKTAPGKKRPVEQSPQEPDSSSGIGKTGQQPAKKRLNFGQTGDSESVPDPQPLGEPPATPAAVGPTTMASGGGAPMADNNEGADGVGNASGNWHCDSQWLGDRVITTSTRTWALPTYNNHLYKQISSASTGASNDNHYFGYSTPWGYFDFNRFHCHFSPRDWQRLINNNWGFRPKRLNFKLFNIQVKEVTDNNGVKTIANNLTSTVQVFSDSEYQLPYVLGSAHQGCLPPFPADVFMIPQYGYLTLNNGSQAVGRSSFYCLEYFPSQMLRTGNNFQFTYTFEDVPFHSSYAHSQSLDRLMNPLIDQYLYYLSRTQTTGGTANTQTLGFSQGGPNTMANQAKNWLPGPCYRQQRVSTTTGQNNNSNFAWTAGTKYHLNGRNSLANPGIAMATHKDDKERFFPSNGILIFGKQNAARDNADYSDVMLTSEEEIKTTNPVATEEYGIVADNLQQQNTAPQIGTVNSQGALPGMVWQNRDVYLQGPIWAKIPHTDGNFHPSPLMGGFGLKHPPPQILIKNTPVPADPPTTFNQSKLNSFITQYSTGQVSVEIEWELQKENSKRWNPEIQYTSNYYKSTSVDFAVNTEGVYSEPHPIGTRYLTRPL

SEQ ID NO: 1043 - protein, 736 aa, Artificial Sequence
  Description of Artificial Sequence: Synthetic polypeptide
MAADGYLPDWLEDTLSEGIRQWWKLKPGPPPPKPAERHKDDSRGLVLPGYKYLGPFNGLDKGEPVNEADAAALEHDKAYDRQLDSGDNPYLKYNHADAEFQERLKEDTSFGGNLGRAVFQAKKRVLEPFGLVEEGAKTAPGKKRPVEQSPQEPDSSSGIGKTGQQPAKKRLNFGQTGDSESVPDPQPLGEPPATPAAVGPTTMASGGGAPMADNNEGADGVGNASGNWHCDSTWLGDRVITTSTRTWALPTYNNHLYKQISSASTGASNDNHYFGYSTPWGYFDFNRFHCHFSPRDWQRLINNNWGFRPKRLNFKLFNIQVKEVTDNNGVKTIANNLTSTVQVFTDSDYQLPYVLGSAHEGCLPPFPADVFMIPQYGYLTLNNGSQAVGRSSFYCLEYFPSQMLRTGNNFQFTYTFEDVPFHSSYAHSQSLDRLMNPLIDQYLYYLSRTQTTGGTANTQTLGFSQGGPNTMANQAKNWLPGPCYRQQRVSTTTGQNNNSNFAWTAGTKYHLNGRNSLANPGIAMATHKDDKERFFPSNGILIFGKQNAARDNADYSDVMLTSEEEIKTTNPVATEEYGIVADNLQQQNTAPQIGTVNSQGALPGMVWQNRDVYLQGPIWAKIPHTDGNFHPSPLMGGFGLKHPPPQILIKNTPVPADPPTTFNQSKLNSFITQYSTGQVSVEIEWELQKENSKRWNPEIQYTSNYYKSTSVDFAVNTEGVYSEPHPIGTRYLTRNL

SEQ ID NO: 1044 - protein, 738 aa, Artificial Sequence
  Description of Artificial Sequence: Synthetic polypeptide
MAADGYLPDWLEDNLSEGIREWWDLKPGAPKPKANQQKQDDGRGLVLPGYKYLGPFNGLDKGEPVNAADAAALEHDKAYDQQLQAGDNPYLRYNHADAEFQERLQEDTSFGGNLGRAVFQAKKRVLEPLGLVEEGAKTAPGKKRPVEPSPQRSPDSSTGIGKKGQQPARKRLNFGQTGDSESVPDPQPLGEPPAAPSGVGPNTMAAGGGAPMADNNEGADGVGSSSGNWHCDSQWLGDRVITTSTRTWALPTYNNHLYKQISNSTSGGSSNDNAYFGYSTPWGYFDFNRFHCHFSPRDWQRLINNNWGFRPKRLSFKLFNIQVKEVTQNEGTKTIANNLTSTIQVFTDSEYQLPYVLGSAHQGCLPPFPADVFMIPQYGYLTLNNGSQAVGRSSFYCLEYFPSQMLRTGNNFTFSYTFEDVPFHSSYAHSQSLDRLMNPLIDQYLYYLSRTQTTGGTANTQTLGFSQGGPNTMANQAKNWLPGPCYRQQRVSTTTGQNNNSNFAWTAGTKYHLNGRNSLANPGIAMATHKDDKERFFPSNGILIFGKQNAARDNADYSDVMLTSEEEIKTTNPVATEEYGIVADNLQQQNTAPQIGTVNSQGALPGMVWQNRDVYLQGPIWAKIPHTDGNFHPSPLMGGFGLKHPPPQILIKNTPVPADPPTTFNQSKLNSFITQYSTGQVSVEIEWELQKENSKRWNPEIQYTSNYYKSTSVDFAVNTEGVYSEPHPIGTRYLTRPL

SEQ ID NO: 1045 - protein, 737 aa, Artificial Sequence
  Description of Artificial Sequence: Synthetic polypeptide
MAADGYLPDWLEDNLSEGIREWWDLKPGAPKPKANQQKQDDGRGLVLPGYKYLGPFNGLDKGEPVNAADAAALEHDKAYDQQLKAGDNPYLRYNHADAEFQERLQEDTSFGGNLGRAVFQAKKRVLEPFGLVEEGAKTAPGKKRPVEQSPQEPDSSSGIGKTGQQPAKKRLNFGQTGDSESVPDPQPLGEPPATPAAVGPTTMASGGGAPMQDNNEGADGVGSSSGNWHCDSTWLGDRVITTSTRTWALPTYNNHLYKQISNGTSGGATNDNTYFGYSTPWGYFDFNRFHCHFSPRDWQRLINNNWGFRPKRLNFKLFNIQVKEVTQNEGTKTIANNLTSTIQVFTDSEYQLPYVLGSAHQGCLPPFPADVFMIPQYGYLTLNNGSQAVGRSSFYCLEYFPSQMLRTGNNFTFSYTFEDVPFHSSYAHSQSLDRLMNPLIDQYLYYLSRTQTTGGTANTQTLGFSQGGPNTMANQAKNWLPGPCYRQQRVSTTTGQNNNSNFAWTAGTKYHLNGRNSLANPGIAMATHKDDKERFFPSNGILIFGKQNAARDNADYSDVMLTSEEEIKTTNPVATEEYGIVADNLQQQNTAPQIGTVNSQGALPGMVWQNRDVYLQGPIWAKIPHTDGNFHPSPLMGGFGLKHPPPQILIKNTPVPADPPTTFNQSKLNSFITQYSTGQVSVEIEWELQKENSKRWNPEIQYTSNYYKSTSVDFAVNTEGVYSEPHPIGTRYLTRPL

SEQ ID NO: 1046 - protein, 736 aa, Artificial Sequence
  Description of Artificial Sequence: Synthetic polypeptide
MAADGYLPDWLEDNLSEGIREWWALKPGAPKPKANQQKQDDGRGLVLPGYKYLGPFNGLDKGEPVNAADAAALEHDKAYDQQLKAGDNPYLRYNHADAEFQERLQEDTSFGGNLGRAVFQAKKRVLEPLGLVEEGAKTAPGKKRPVEQSPQEPDSSSGIGKTGQQPAKKRLNFGQTGDSESVPDPQPLGEPPATPAAVGPTTMASGGGAPMADNNEGADGVGSSSGNWHCDSTWLGDRVITTSTRTWALPTYNNHLYKQISSASTGASNDNHYFGYSTPWGYFDFNRFHCHFSPRDWQRLINNNWGFRPKRLNFKLFNIQVKEVTDNNGVKTIANNLTSTVQVFTDSDYQLPYVLGSAHEGCLPPFPADVFMIPQYGYLTLNNGSQAVGRSSFYCLEYFPSQMLRTGNNFTFSYTFEDVPFHSSYAHSQSLDRLMNPLIDQYLYYLSRTQTTGGTANTQTLGFSQGGPNTMANQAKNWLPGPCYRQQRVSTTTGQNNNSNFAWTAGTKYHLNGRNSLANPGIAMATHKDDKERFFPSNGILIFGKQNAARDNADYSDVMLTSEEEIKTTNPVATEEYGIVADNLQQQNTAPQIGTVNSQGALPGMVWQNRDVYLQGPIWAKIPHTDGNFHPSPLMGGFGLKHPPPQILIKNTPVPADPPTTFNQSKLNSFITQYSTGQVSVEIEWELQKENSKRWNPEIQYTSNYYKSTSVDFAVNTEGVYSEPHPIGTRYLTRPL

SEQ ID NO: 1047 - protein, 737 aa, Artificial Sequence
  Description of Artificial Sequence: Synthetic polypeptide
MAADGYLPDWLEDNLSEGIREWWDLKPGAPKPKANQQKQDDGRGLVLPGYKYLGPFNGLDKGEPVNAADAAALEHDKAYDQQLKAGDNPYLRYNHADAEFQERLQEDTSFGGNLGRAVFQAKKRVLEPLGLVEEGAKTAPGKKRPVEPSPQRSPDSSTGIGKKGQQPARKRLNFGQTGDSESVPDPQPLGEPPATPAAVGPTTMASGGGAPMADNNEGADGVGNASGNWHCDSTWLGDRVITTSTRTWALPTYNNHLYKQISSASTGASNDNHYFGYSTPWGYFDFNRFHCHFSPRDWQRLINNNLGSRPKRLNFKLFIIQVKEVTTNDGVTTIANNLTSTVQVFSDSEYQLPYVLGSAHQGCLPPFPADVFMIPQYGYLTLNNGSQAVGRSSFYCLEYFPSQMLRTGNNFTFSYTFEDVPFHSSYAHSQSLDRLMNPLIDQYLYYLNRTQNQSGSAQNKDLLFSRGSPAGMSVQPKNWLPGPCYRQQRVSKTKTDNNNSNFTWTGASKYNLNGRESIINPGTAMASHKDDKDKFFPMSGVMIFGKESAGASNTALDNVMITDEEEIKATNPVATERFGTVAVNLQSSSTDPATGDVHVMGALPGMVWQDRDVYLQGPIWAKIPHTDGHFHPSPLMGGFGLKHPPPQILIKNTPVPANPPAEFSATKFASFITQYSTGQVSVEIEWELQKENSKRWNPEVQYTSNYAKSANVDFTVDNNGLYTEPRPIGTRYLTRPL

SEQ ID NO: 1048 - protein, 736 aa, Artificial Sequence
  Description of Artificial Sequence: Synthetic polypeptide
MAADGYLPDWLEDNLSEGIREWWALKPGAPKPKANQQKQDDGRGLVLPGYKYLGPFNGLDKGEPVNAADAAALEHDKAYDQQLKAGDNPYLRYNHADAEFQERLQEDTSFGGNLGRAVFQAKKRLLEPLGLVEEAAKTAPGKKRPVEQSPQEPDSSSGIGKTGQQPAKKRLNFGQTGDSESVPDPQPIGEPPATPAAVGPTTMASGGGAPMADNNEGADGVGNSSGNWHCDSTWLGDRVITTSTRTWALPTYNNHLYKQISSASTGASNDNHYFGYSTPWGYFDFNRFHCHFSPRDWQRLINNNWGFRPKRLNFKLFNIQVKEVTQNEGTKTIANNLTSTIQVFTDSEYQLPYVLGSAHQGCLPPFPADVFMIPQYGYLTLNNGSQAVGRSSFYCLEYFPSQMLRTGNNFTFSYTFEDVPFHSSYAHSQSLDRLMNPLIDQYLYYLSRTQTTGGTANTQTLGFSQGGPNTMANQAKNWLPGPCYRQQRVSTTTGQNNNSNFAWTAGTKYHLNGRNSLANPGIAMATHKDDKERFFPSNGILIFGKQNAARDNADYSDVMLTSEEEIKTTNPVATEEYGIVADNLQQQNTAPQIGTVNSQGALPGMVWQNRDVYLQGPIWAKIPHTDGNFHPSPLMGGFGLKHPPPQILIKNTPVPADPPTTFNQSKLNSFITQYSTGQVSVEIEWELQKENSKRWNPEIQYTSNYYKSTSVDFAVNTEGVYSDPHPIGTRYLTRPL

SEQ ID NO: 1049 - protein, 736 aa, Artificial Sequence
  Description of Artificial Sequence: Synthetic polypeptide
MAADGYLPDWLEDNLSEGIREWWALKPGAPKPKANQQEQDDGRGLVLPGYKYLGPFNGLDKGEPVNAADAAALEHDKAYDQQLKAGDNPYLRYNHADAEFQERLQEDTSFGGNLGRAVFQAKKRVLEPFGLVEEGAKTAPGKKRPVEQSPQEPDSSSGIGKTGQQPAKKRLNFGQTGDSESVPDPQPLGEPPAAPSGVGPNTMAAGGGAPMADNNEGADGVGSSSGNWHCDSTWLGDRVITTSTRTWALPTYNNHLYKQISSASTGASNDNHYFGYSTPWGYFDFNRFHCHFSPRDWQRLINNNWGFRPKRLNFKLFNIQVKEVTQNEGTKTIANNLTSTIQVFTDSEYQLPYVLGSAHQGCLPPFPADVFMIPQYGYLTLNNGSQAVGRSSFFCLEYFPSQMLRTGNNFTFSYTFEDVPFHSSYAHSQSLDRLMNPLIDQYLYYLSRTQTTGGTANTQTLGFSQGGPNTMANQAKNWLPGPCYRQQRVSTTTGQNNNSNFAWTAGTKYHLNGRNSLANPGIAMATHKDDKERFFPSNGILIFGKQNAARDNADYSDVMLTSEEEIKTTNPVATEEYGIVADNLQQQNTAPQIGTVNSQGALPGMVWQNRDVYLQGPIWAKIPHTDGNFHPSPLMGGFGLKHPPPQILIKNTPVPADPPTTFNQSKLNSFITQYSTGQVSVEIEWELQKENSKRWNPEIQYTSNYYKSTSVDFAVNTEGVYSEPHPIGTRYLTRPL

SEQ ID NO: 1050 - protein, 736 aa, Artificial Sequence
  Description of Artificial Sequence: Synthetic polypeptide
MAADGYLPDWLEDNLSEGIREWWDLKPGAPKPKANQQKQDDGRGLVLPGYKYLGPFNGLDKGEPVNAADAAALEHDKAYDQQLKAGDNPYLRYNHADAEFQERLQEDTSFGGNLGRAVFQAKKRVLEPLGLVEEGAKTAPGKKRPVEQSPQEPDSSSGIGKTGQQPAKKRLNFGQTGDSESVPDPQPLGEPPATPAAVGPTTMASGGGAPMADNNEGADGVGNASGNWHCDSTWLGDRVITTSTRTWALPTYNNHLYKQISSASTGASNDNHYFGYSTPWGYFDFNRFHCHFSPRDWQRLINNNWGFRPKRLNFKLFNIQVKEVTTNDGVTTIANNLTSTVQVFSDSEYQLPYVLGSAHQGCLPPFPADVFMIPQYGYLTLNNGSQAVGRSSFYCLEYFPSQMLRTGNNFTFSYTFEDVPFHSSYAHSQSLDRLMNPLIDQYLYYLNRTQNQSGSAQNKDLLFSRGSPAGMSVQPKNWLPGPCYRQQRVSKTKTDNNNSNFTWTGASKYNLNGRESIINPGTAMASHKDDKDKFFPMSGVMIFGKESAGASNTALDNVMITDEEEIKATNPVATERFGTVAVNLQNSSTDPATGDVHVMGALPGMVWQDRDVYLQGPIWAKIPHTDGHFHPSPLMGGFGLKHPPPQILIKNTPVPANPPAEFSATKFASFITQYSTGQVSVEIEWELQKENSKRWNPEVQYTSNYAKSANVDFTVDNNGLYTVPRPIGTRYLTRPL

SEQ ID NO: 1051 - protein, 736 aa, Artificial Sequence
  Description of Artificial Sequence: Synthetic polypeptide
MAADGYLPDWLEDNLSEGIREWWALKPGAPKPKANQQKQDDGRGLVLPGYKYLGPFNGLDKGEPVNAADAAALEHDKAYDQQLKAGDNPYLRYNHADAEFQERLQEDTSFGGNLGRAVFQAKKRLLEPLGLVEEGAKTAPGKKRPVEQSPQEPDSSSGIGKTGEQPAKKRLNFGQTGDSESVPDPQPLGEPPATPAAVGPTTMASGGGAPMADNNEGADGVGSASGNWHCDSTWLGDRVITTSTRTWALPTYNNHLYKQISSASTGASNDNHYFGYSTPWGYFDFNRFHCHFSPRDWQRLINNNWGFRPKRLNFKLFNIQVKEVTDNNGVKTIANNLTSTIQVFTDSEYQLPYVLGSAHQGCLPPFPADVFMIPQYGYLTLNNGSQAVGRSSFYCLEYFPSQMLRTGNNFPFSYTFEDVPFHSSYAHSQSLDRLMNPLIDQYLYYLSRTQTTGGTANTQTLGFSQGGPNTMANQAKNWLPGPCYRQQRVSTTTGQNNNSNFAWTAGTKYHLNGRNSLANPGIAMATHKDDKERFFPSNGILIFGKQNAARDNADYSDVMLTSEEEIKTTNPVATEEYGIVADNLQQQNTAPQIGTVNSQGALPGMVWQNRDVYLQGPIWAKIPHTDGNFHPSPLMGGFGLKHPPPQILIKNTPVPADPPTTFNQSKLNSFITQYSTGQVSVEIEWELQKENSKRWNPEIQYTSNYYKSTSVDFAVNTEGVYSEPHPIGTRYLTRPL

SEQ ID NO: 1052 - protein, 736 aa, Artificial Sequence
  Description of Artificial Sequence: Synthetic polypeptide
MAADGYLPDWLEDNLSEGIREWWALKPGAPKPKANQQKQDDGRGLVLPGYKYLGPFNGLDKGEPVNAADAAALEHDKAYDQQLKAGDNPYLRYNHADAEFQERLQEDTSFGGNLGRAVFQAKKRVLEPLGLVEEGAKTAPGKKRPVEQSPQEPDSSSGIGKTGQQPAKKRLNFGQTGDSESVPDPQPLGEPPATPAAVGPTTMASGGGAPMADNNEGADGVGSSSGNWHCDSQWLGDRVITTSTRTWALPTYNNHLYKQISSASTGASNDNHYFGYSTPWGYFDFNRFHCHFSPRDWQRLINNNWGFRPKRLNFKLFNIQVKEVTDNNGVKTIANNLTSTVQVFTDSEYQLPYVLGSAHQDCLPPFPADVFMIPQYGYLTLNNGSQAVGRSSFYCLEYFPSQMLRTGNNFTFSYTFEDVPFHSSYAHSQSLDRLMNPLIDQYLYYLSRTQTTGGTANTQTLGFSQGGPNTMANQAKNWLPGPCYRQQRVSTTTGQNNNSNFAWTAGTKYHLNGRNSLANPGIAMATHKDDKERFFPSNGILIFGKQNAARDNADYSDVMLTSEEEIKTTNPVATEEYGIVADNLQQQNTAPQIGTVNSQGALPGMVWQNRDVYLQGPIWAKIPHTDGNFHPSPLMGGFGLKHPPPQILIKNTPVPADPPTTFNQSKLNSFITQYSTGQVSVEIEWELQKENSKRWNPEIQYTSNYYKSTSVDFAVNTEGVYSEPHPIGTRYLTRPL

SEQ ID NO: 1053 - protein, 735 aa, Artificial Sequence
  Description of Artificial Sequence: Synthetic polypeptide
MAADGYLPDWLEDNLSEGIREWWDLKPGAPKPKANQQKQDDGRGLVLPGYKYLGPFNGLDKGEPVNAADAAALEHDKAYDQQLKAGDNPYLRYNHADAEFQERLQEDTSFGGNLGRAVFQAKKRVLEPLGLVEEGAKTAPGKKRPVEQSPQEPDSSSGIGKTGQQPAKKRLNFGQTGDSESVPDPQPLGEPPATPAAVGPTTMASGGGAPMADNNEGADGVGNASGNWHCDSTWLGDVITTSTRTWALPTYNNHLYKQISSASTGASNDNHYFGYSTPWGYFDFNRFHCHFSPRDWQRLINNNWGFRPKRLNFKLFNIQVKEVTQNEGTKTIANNLTSTIQVFTDSEYQLPYVLGSAHQGCLPPFPADVFMIPQYGYLTLNNGSQAVGRSSFYCLEYFPSQMLRTGNNFQFTYTFEDVPFHSSYAHSQSLDRLMNPLIDQYLYYLSRTQTTGGTANTQTLGFSQGGPNTMANQAKNWLPGPCYRQQRVSTTTGQNNNSNFAWTAGTKYHLNGRNSLANPGIAMATHKDDKERFFPSNGILIFGKQNAARDNADYSDVILTSEEEIKTTNPVATEEYGIVADNLQQQNTAPQIGTVNSQGALPGMVWQNRDVYLQGPIWAKIPHTDGNFHPSPLMGGFGLKHPPPQILIKNTPVPADPPTTFNQSKLNSFITQYSTGQVSVEIEWELQKENSKRWNPEIQYTSNYYKSTSVDFAVNTEGVYSEPHPIGTRYLTRPL

SEQ ID NO: 1054 - protein, 736 aa, Artificial Sequence
  Description of Artificial Sequence: Synthetic polypeptide
MAADGYLPDWLEDTLSEGIRQWWKLKPGPPPPKPAERHKDDSRGLVLPGYKYLGPFNGLDKGEPVNEADAAALEHDKAYDRQLDSGDNPYLKYNHADAEFQERLKEDTSFGGNLGRAVFQAKKRVLEPFGLVEEGAKTAPGKKRPVEQSPQEPDSSSGIGKTGQQPAKKRLNFGQTGDSESVPDPQPLGEPPATPAAVGPTTMASGGGAPMADNNEGADGVGNASGNWHCDSTWLGDRVITTSTRTWALPTYNNHLYKQISSTSTGASNDNHYFGYSTPWGYFDFNRFHCHFSPRDWQRLINNNWGFRPKRLNFKLFNIQVKEVTDNNGVKTIANNLTSTVQVFTDSEYQLPYVLGSAHQGCLPPFPADVFMIPQYGYLTLNNGSQAVGRSSFYCLEYFPSQMLRTGNNFTFSYTFEDVPFHSSYAHSQSLDRLMNPLIDQYLYYLSRTQTTGGTANTQTLGFSQGGPNTMANQAKNWLPGPCYRQQRVSTTTGQNNNSNFAWTAGTKYHLNGRNSLANPGIAMATHKDDKERFFPSNGILIFGKQNAARDNADYSDVMLTSEEEIKTTNPVATEEYGIVADNLQQQNTAPQIGTVNSQGALPGMVWQNRDVYLQGPIWAKIPHTDGNFHPSPLMGGFGLKHPPPQILIKNTPVPADPPTTFNQSKLNSFITQYSTGQVSVEIEWELQKENSKRWNPEIQYTSNYYKSTSVDFAVNTEGVYSEPHPIGTRYLTRPL

SEQ ID NO: 1055 - protein, 735 aa, Artificial Sequence
  Description of Artificial Sequence: Synthetic polypeptide
MAADGYLPDWLEDNLSEGIREWWDLKPGAPKPKANQQKQDDGRGLVLPGYKYLGPFNGLDKGEPVNAADAAALEHDKAYDRQLDSGDNPYLRYNHADAEFQERLKEDTSFGGNLGRAVFQAKKRVLEPFGLVEEGAKTAPGKKRPVEQSPQEPDSSSGIGKTGQQPAKKRLNFGQTGDSESVPDPQPLGEPPATPAAVGPTTMASGGGAPMADNNEGADGVGNASGNWHCDSTWLGDRVITTSTRTWALPTYNNHLYKQISSASTGASNDNHYFGYSTPWGYFDFNRFHCHFSPRDWQRLINNNWGFRPKRLNFKLFNIQVKEVTQNEGTKTIANNLTSTIQVFTDSEYQLPYVLGSAHQGCLPPFPADVFMIPQYGYLTLNNGSQAVGRSSFYCLEYFPSQMLRTGNNFQFTYTFEDVPFHSSYAHSQSLDRLMNPLIDQYLYYLSRTQTTGGTANTQTLGFSQGGPNTMANQAKNWLPGPCYRQQRVSTTTGQNNNSNFAWTAGTKYHLNGRNSLANPGIAMATHKDDRSVFFQYRDPDFGKQNAARDNADYSDVMLTSEEEIKTTNPVATEEYGIVADNLQQQNTAPQIGTVNSQGALPGMVWQNRDVYLQGPIWAKIPHTDGNFHPSPLMGGFGLKHPPPQILIKNTPVPADPPTTFNQSKLNSFITQYSTGQVSVEIEWELQKENSKRWNPEIQYTSNYYKSTSVDFAVNTEGVYSEPHPIGTRYLTRPL

SEQ ID NO: 1056 - protein, 736 aa, Artificial Sequence
  Description of Artificial Sequence: Synthetic polypeptide
MAADGYLPDWLEDNLSEGIREWWALKPGAPKPKANQQKQDDGRGLVLPGYKYLGPFNGLDKGEPVNAADAAALEHDKAYDQQLKAGDNPYLKYNHADAEFQERLQGDTSFGGNLGRAVFQAKKRVLEPLGLVEEAAKTAPGKKRPVEQSPQEPDSSAGIGKSGAQPAKKRLNFGQTGDTESVPDPQPLGEPPAAPSGVGPNTMAAGGGAPMADNNEGADGVGSSSGNWHCDSQWLGDRVITTSTRTWALPTYNNHLYKQISSASTGASNDNHYFGYSTPWGYFDFNRFHCHFSPRDWQRLINNNWGFRPKRLNFKLFNIQVKEVTDNNGVKTIANNLTSTVQVFTDSDYQLPYVLGSAHEGCLPPFPADVFMIPQYGYLTLNNGSQAVGRSSFYCLEYFPSQMLRTGNNFQFTYTFEDVPFHSSYAHSQSLDRLMNPLIDQYLYYLSRTQTTGGTANTQTLGFSQGGPNTMANQAKNWLPGPCYRQQRVSTTTGQNNNSNFAWTAGTKYHLNGRNSLANPGIAMATHKDDKERFFPSNGILIFGKQNAARDNADYSDVMLTSEEEIKTTNPVATEEYGIVADNLQQQNTAPQIGTVNSQGALPGMVWQNRDVYLQGPIWAKIPHTDGNFHPSPLMGGFGLKHPPPQILIKNTPVPADPPTTFNQSKLNSFITQYSTGQVSVEIEWELQKENSKRWNPEIQYTSNYYKSTSVDFAVNTEGVYSEPHPIGTRYLTRPL

SEQ ID NO: 1057 - protein, 736 aa, Artificial Sequence
  Description of Artificial Sequence: Synthetic polypeptide
MAADGYLPDWLEDTLSEGIRQWWKLKPGPPPPKPAERHKDDSRGLVLPGYKYLGPFNGLDKGEPVNEADAAALEHDKAYDRQLDSGDNPYLKYNHADAEFQERLKEDTSFGGNLGRAVFQAKKRVLEPFGLVEEAAKTAPGKKRPVEQSPQEPDSSSGIGKTGQQPAKKRLNFGQTGDSESVPDPQPLGEPPATPAAVGPTTMASGGGAPMADNNEGADGVGNASGNWHCDSTWLGDRVITTSTRTWALPTYNNHLYKQISSASTGASNDNHYFGYSTPWGYFDFNRFHCHFSPRDWQRLINNNWGFRPKRLNFKLFNIQVKEVTDNNGVKTIANNLTSTVQVFTDSDYQLPYVLGSAHEGCLPPFPADVFMIPQYGYLTLNNGSQAVGRSSFYCLEYFPSQMLRTGNNFTFSYTFEDVPFHSSYAHSQSLDRLMNPLIDQYLYYLSRTQTTGGTANTQTLGFSQGGPNTMANQAKNWLPGPCYRQQRVSTTTGQNNNSNFAWTAGTKYHLNGRNSLANPGIAMATHKDDKERFFPSNGILIFGKQNAARDNADYSDVMLTSEEEIKTTNPVATEEYGIVADNLQQQNTAPQIGTVNSQGALPGMVWQNRDVYLQGPIWAKIPHTDGNFHPSPLMGGFGLKHPPPQILIKNTPVPADPPTTFNQSKLNSFITQYSTGQVSVEIEWELQKENSKRWNPEIQYTSNYYKSTSVDFAVNTEGVYSEPHPIGTRYLTRPL

SEQ ID NO: 1058 - protein, 736 aa, Artificial Sequence
  Description of Artificial Sequence: Synthetic polypeptide
MAADGYLPDWLEDNLSEGIREWWALKPGAPKPKANQQKQDDGRGLVLPGYKYLGPFNGLDKGEPVNAADAAALEHDKAYDQQLKAGDNPYLRYNHADAEFQERLQEDTSFGGNLGRAVFQAKKRVLEPLGLVEEGAKTAPGKKRPVEQSPQEPDSSSGIGKTGQQPAKKRLNFGQTGDSESVPDPQPLGEPPATPAAVGPTTMASGGGAPMADNNEGADGVGSSSGNWHCDSTWLGDRVITTSTRTWALPTYNNHLYKQISSASTGASNDNHYFGYSTPWGYFDFNRFHCHFSPRDWQRLINNNWGFRPKRLNFKLFNIQVKEVTDNNGVKTIANNLTSTVQVFTDSEYQLPYVLGSAHQGCLPPFPADVFMIPQYGYLTLNNGSQAVGRSSFYCLEYFPSQMLRTGNNFTFSYTFEDVPFHSSYAHSQSLDRLMNPLIDQYLYYLSRTQTTGGTANTQTLGFSQGGPNTMANQAKNWLPGPCYRQQRVSTTTGQNNNSNFAWTAGTKYHLNGRNSLANPGIAMATHKDDKERFFPSNGILIFGKQNAARDNADYSDVMLTSEEEIKTTNPVATEEYGIVADNLQQQNTAPQIGTVNSQGALPGMVWQNRDVYLQGPIWAKIPHTDGNFHPSPLMGGFGLKHPPPQILIKNTPVPADPPTTFNQSKLNSFITQYSTGQVSVEIEWELQKENSKRWNPEIQYTSNYYKSTSVDFAVNTEGVYSEPHPIGTRYLTRPL

SEQ ID NO: 1059 - protein, 737 aa, Artificial Sequence
  Description of Artificial Sequence: Synthetic polypeptide
MAADGYLPDWLEDNLSEGIREWWALKPGAPKPKANQQKQDDGRGLVLPGYKYLGPFNGLDKGEPVNAADAAALEHDKAYDQQLKAGDNPYLRYNHADAEFQERLQEDTSFGGNLGRAVFQAKKRVLEPLGLVEEGAKTAPGKKRPVEQSPQEPDSSSGIGKTGQQPAKKRLNFGQTGDTESVPDPQPIGEPPAAPSGVGSLTMASGGGAPVADNNEGADGVGSSSGNWHCDSQWLGDRVITTSTRTWALPTYNNHLYKQISNSTSGGSSNDNAYFGYSTPWGYFDFNRFHCHFSPRDWQRLINNNWGFRPKRLNFKLFNIQVKEVTQNEGTKTIANNLTSTIQVFTDSEYQLPYVLGSAHQGCLPPFPADVFMIPQYGYLTLNNGSQAVGRSSFYCLEYFPSQMLRTGNNFQFTYTFEDVPFHSSYAHSQSLDRLMNPLIDQYLYYLSRTQTTGGTANTQTLGFSQGGPNTMANQAKNWLPGPCYRQQRVSTTTGQNNNSNFAWTAGTKYHLNGRNSLANPGIAMATHKDDKERFFPSNGILIFGKQNAARDNADYSDVMLTSEEEIKTTNPVATEEYGIVADNLQQQNTAPQIGTVNSQGALPGMVWQNRDVYLQGPIWAKIPHTDGNFHPSPLMGGFGLKHPPPQILIKNTPVPADPPTTFNQSKLNSFITQYSTGQVSVEIEWELQKENSKRWNPEIQYTSNYYKSTSVDFAVNTEGVYSEPHPIGTRYLTRPL

SEQ ID NO: 1060 - protein, 736 aa, Artificial Sequence
  Description of Artificial Sequence: Synthetic polypeptide
MAADGYLPDWLEDNLSEGIREWWALKPGAPKPKANQQKQDDGRGLVLPGYKYLGPFNGLDKGEPVNAADAAALEHDKAYDQQLKAGDNPYLKYNHADAEFQERLQGDTSFGGNLGRAVFQAKKRVLEPLGLVEEAAKTAPGKKRPVEQSPQEPDSSAGIGKSGAQPAKKRLNFGQTGDTESVPDPQPLGEPPAAPSGVGPNTMAAGGGAPMADNNEGADGVGSSSGNWHCDSQWLGDRVITTSTRTWALPTYNNHLYKQISSASTGASNDNHYFGYSTPWGYFDFNRFHCHFSPRDWQRLINNNWGFRPKRLNFKLFNIQVKEVTDNNGVKTIANNLTSTVQVFTDSEYQLPYVLGSAHQGCLPPFPADVFMIPQYGYLTLNNGSQAVGRSSFYCLEYFPSQMLRTGNNFTFSYTFEDVPFHSSYAHSQSLDRLMNPLIDQYLYYLSRTQTTGGTANTQTLGFSQGGPNTMANQAKNWLPGPCYRQQRVSTTTGQNNNSNFAWTAGTKYHLNGRNSLANPGIAMATHKDDKERFFPSNGILIFDKQNAARDNADYSDVMLTSEEEIKTTNPVATEEYGIVADNLQQQNTAPQIGTVNSQGALPGMVWQNRDVYLQGPIWAKIPHTDGNFHPSPLMGGFGLKHPPPQILIKNTPVPADPPTTFNQSKLNSFITQYSTGQVSVEIEWELQKENSKRWNPEIQYTSNYYKSTSVDFAVNTEGVYSEPHPIGTRYLTRPL

SEQ ID NO: 1061 - protein, 736 aa, Artificial Sequence
  Description of Artificial Sequence: Synthetic polypeptide
MAADGYLPDWLEDTLSEGIRQWWKLKPGPPPPKPAERHKDDSRGLVLPGYKYLGPFNGLDKGEPVNEADAAALEHDKAYDRQLDSGDNPYLKYNHADAEFQERLKEDTSFGGNLGRAVFQAKKRVLEPLGLVEEPVKTAPGKKRPVEHSPVEPDSSSGTGKAGQQPARKRLNFGQTGDSESVPDPQPLGEPPATPAAVGPNTMATGSGAPMADNNEGADGVGNSSGNWHCDSTWMGDRVITTSTRTWALPTYNNHLYKQISSASTGASNDNHYFGYSTPWGYFDFNRFHCHFSPRDWQRLINNNWGFRPKRLNFKLFNIQVKEVTDNNGVKTIANNLTSTIQVFTDSEYQLPYVLGSAHQGCLPPFPADVFMIPQYGYLTLNNGSQAVGRSSFYCLEYFPSQMLRTGNNFTFSYTFEDVPFHSSYAHSQSLDRLMNPLIDQYLYYLSRTQTTGGKANTQTLGFSQGGPNTMANQAKNWLPGPCYRQQRVSTTTGQNNNSNFAWTAGTKYHLNGRNSLANPGIAMATHKDDKERFFPSNGILIFGKQNAARDNADYSDVMLTSEEEIKTTNPVATEEYGIVADNLQQQNTAPQIGTVNSQGALPGMVWQNRDVYLQGPIWAKIPHTDGNFHPSPLMGGFGLKHPPPQILIKNTPVPADPPTTFNQSKLNSFITQYSTGQVSVEIEWELQKENSKRWNPEIQYTSNYYKSTSVDFAVNTEGVYSEPHPIGTRYLTRPL

SEQ ID NO: 1062 - protein, 736 aa, Artificial Sequence
  Description of Artificial Sequence: Synthetic polypeptide
MAADGYLPDWLEDNLSEGIREWWALKPGAPKPKANQQKQDDGRGLVLPGYKYLGPFNGLDKGEPVNAADAAALEHDKAYDQQLKAGDNPYLRYNHADAEFQERLQEDTSFGGNLGRAVFQAKKRVLEPFGLVEEGAKTAPGKKRPVEQSPQEPDSSSGIGKTGQQPAKKRLNFGQTGDSESVPDPQPLGEPPATPAAVGPTTMASGGGAPMADNNEGADGVGNASGNWHCDSTWLGDRVITTSTRTWALPTYNNHLYKQISSASTGASNDNHYFGYSTPWGYFDFNRFHCHFSPRDWQRLINNNWGFRPKRLNFKLFNIQVKEVTDNNGVKTIANNLTSTVQVFTDSEYQLPYVLGSAHQGCLPPFPADVFMIPQYGYLTLNNGSQAVGRSSFYCLEYFPSQMLRTGNNFTFSYTFEDVPFHSSYAHSQSLDRLMNPLIDQYLYYLSRTQTTGGTGNTQTLGFSQGGPNTMANQAKNWLPGPCYRQQRVSTTTGQNNNSNFAWTAGTKYHLNGRNSLANPGIAMATHKDDKERFFPSNGILIFGKQNAARDNADYSDVMLTSEEEIKTTNPVATEEYGIVADNLQQQNTAPQIGTVNSQGALPGMVWQNRDVYLQGPIWAKIPHTDGNFHPSPLMGGFGLKHPPPQILIKNTPVPADPPTTFNQSKLNSFITQYSTGQVSVEIEWELQKENSKRWNPEIQYTSNYYKSTSVDFAVNTEGVYSEPHPIGTRYLTRPL

SEQ ID NO: 1063 - protein, 736 aa, Artificial Sequence
  Description of Artificial Sequence: Synthetic polypeptide
MAADGYLPDWLEDNLSEGIREWWDLKPGAPKPKANQQKQDDGRGLVLPGYKYLGPFNGLDKGEPVNAADAAALEHDKAYDQQLKAGDNPYLRYNHADAEFQERLQEDTSFGGNLGRAVFQAKKRVLEPLGLVEEGAKTAPGKKRPVEQSPQEPDSSSGIGKTGQQPAKKRLNFGQTGDSESVPDPQPLGEPPATPAAVGPTTMASGGGAPMADNNEGADGVGSSSGNWHCDSTWLGDRVITTSTRTWALPTYNNHLYKQISSASTGASNDNHYFGYSTPWGYFDFNRFHCHFSPRDWQRLINNNWGFRPKRLNFKLFNIQVKEVTQNEGTKTIANNLTSTIQVFTDSEYQLPYVLGSAHQGCLPPFPADVFMIPQYGYLTLNNGSQAVGRSSFYCLEYFPSQMLRTGNNFTFSYTFEDVPFHSSYAHSQSLDRLMNPLIDQYLYYLSRTQTTGGTANTQTLGFSQGGPNTMANQAKNWLPGPCYRQQRVSTTTGQNNNSNFAWTAGTKYHLNGRNSLANPGIAMATHKDDKERFFPSNGILIFGKQNAARDNADYSDVMLTSEEEIKTTNPVATEEYGIVADNLQQQNTAPQIGTVNSQGALPGMVWQNRDVYLQGPIWAKIPHTDGNFHPSPLMGGFGLKHPPPQILIKNTPVPADPPTTFNQSKLNSFITQYSTGQVSVEIEWELQKENSKRWNPEIQYTSNYYKSTSVDFAVNTEGVYSEPHPIGTRYLTRPL

SEQ ID NO: 1064 - protein, 736 aa, Artificial Sequence
  Description of Artificial Sequence: Synthetic polypeptide
MAADGYLPDWLEDNLSEGIREWWALKPGAPKPKANQQKQDDGRGLVLPGYKYLGPFNGLDKGEPVNAADAAALEHDKAYDQQLKAGDNPYLRYNHADAEFQERLQEDTSFGGNLGRAVFQAKKRVLEPLGLVEEGAKTAPGKKRPVEQSPQEPDSSSGIGKTGQQPAKKRLNFGQTGDSESVPDPQPLGEPPATPAAVGPTTMAAGGGAPMADNNEGADGVGSSSGNWHCDSTWMGDRVITTSTRTWALPTYNNHLYKQISSASTGASNDNHYFGYSTPWGYFDFNRFHCHFSPRDWQRLINNNWGFRPKRLSFKLFNIQVKEVTQNEGTKTIANNLTSTIQVFTDSEYQLPYVLGSAHQGCLPPFPADVFMIPQYGYLTLNNGSQAVGRSSFYCLEYFPSQMLRTGNNFTFSYTFEDVPFHSSYAHSQSLDRLMNPLIDQYLYYLSRTQTTGGTANTQTLGFSQGGPNTMANQAKNWLQGPCYRQQRVSTTTGQNNNSNFAWTAGTKYHLNGRNSLANPGIAMATHKDDKERFFPSNGILIFGKQNAARDNADYSDVMLTSEEEIKTTNPVATEEYGIVADNLQQQNTAPQIGTVNSQGALPGMVWQNLDVYLQGPIWAKIPHTDGNFHPSPLMGGFGLKHPPPQILIKNTPVPADPPTTFNQSKLNSFITQYSTGQVSVEIEWELQKENSKRWNPEIQYTSNYYKSTSVDFAVNTEGVYSEPHPIGTRYLTRPL

SEQ ID NO: 1065 - protein, 737 aa, Artificial Sequence
  Description of Artificial Sequence: Synthetic polypeptide
MAADGYLPDWLEDNLSEGIREWWALKPGAPKPKANQQKQDDGRGLVLPGYKYLGPFNGLDKGEPVNAADAAALEHDKAYDQQLKAGDNPYLRYNHADAEFQERLQEDTSFGGNLGRAVFQAKKRVLEPLGLVEEGAKTAPGKKRPVEPSPQRSPDSSSGIGKTGQQPAKKRLNFGQTGDSESVPDPQPLGEPPATPAAVGPTTMASGGGAPMADNNEGADGVGNASGNWHCDSQWLGDRVITTSTRTWALPTYNNHLYKQISSASTGASNDNHYFGYSTPWGYFDFNRFHCHFSPRDWQRLINNNWGFRPKRLNFKLFNIQVKEVTDNNGVKTIANNLTSTVQVFTDSDYQLPYVLGSAHEGCLPPFPADVFMIPQYGYLTLNNGSQAVGRSSFYCLEYFPSQMLRTGNNFQFTYTFEDVPFHSSYAHSQSLDRLMNPLIDQYLYYLSRTQTTGGTANTQTLGFSQGGPNTMANQAKNWVPGPCYRQQRVSTATGQNNNSNFAWTAGTKYHLKGRNSLANPGIAMATHKDDKERFFPSNGILIFGKQNAARDNADYSDVMLTSEEEIKTTNPVATEEYGIVADNLQQQNTAPQIGTVNSQGALPGMVWQNRDVYLQGPIWAKIPHTDGNFHPSPLMGGFGLKHPPPQILIKNTPVPADPPTTFNQSKLNSFITQYSTGQVSVEIEWELQKENSKRWNPEIQYTSNYYKSTSVDFAVNTEGVYSEPHPIGTRYLTRPL

SEQ ID NO: 1066 - protein, 737 aa, Artificial Sequence
  Description of Artificial Sequence: Synthetic polypeptide
  MOD_RES (226)..(226): Any naturally occurring amino acid
  MOD_RES (233)..(233): Any naturally occurring amino acid
  MOD_RES (239)..(239): Any naturally occurring amino acid
  MOD_RES (250)..(250): Any naturally occurring amino acid
  MOD_RES (253)..(253): Any naturally occurring amino acid
  MOD_RES (255)..(255): Any naturally occurring amino acid
MAADGYLPDWLEDTLSEGIRQWWKLKPGPPPPKPAERHKDDSRGLVLPGYKYLGPFNGLDKGEPVNEADAAALEHDKAYDRQLDSGDNPYLKYNHADAEFQERLKEDTSFGGNLGRAVFQAKKRVLEPLGLVEEGAKTAPGKKRPVEQSPQEPDSSSGIGKTGQQPAKKRLNFGQTGDSESVPDPQPLGEPPATPSGVGPNTMAAGGGAPMADNNEGADGVGSSSXNWHCDSXWLGDRXITTSTRTWALXTYXNXLYKQISNSTSGGATNDNTYFGYSTPWGYFDFNRFHCHFSPRDWQRLINNNWGFRPKRLNFKLFNIQVKEVTQNEGTKTIANNLTSTIQVFTDSEYQLPYVLGSAHQGCLPPFPADVFMIPQYGYLTLNNGSQAVGRSSFYCLEYFPSQMLRTGNNFQFTYTFEDVPFHSSYAHSQSLDRLMNPLIDQYLYYLSRTQTTGGTANTQTLGFSQGGPNTMANQAKNWLPGPCYRQQRVSTTTGQNNNSNFAWTAGTKYHLNGRNSLANPGIAMATHKDDKERFFPSNGILIFGKQNAARDNADYSDVMLTSEEEIKTTNPVATEEYGIVADNLQQQNTAPQIGTVNSQGALPGMVWQNRDVYLQGPIWAKIPHTDGNFHPSPLMGGFGLKHPPPQILIKNTPVPADPPTTFSQAKLASFITQYSTGQVSVEIEWELQKENSKRWNPEVQYTSNYAKSANVDFTVDNNGLYTEPRPIGTRYLTRPL

SEQ ID NO: 1067 - protein, 737 aa, Artificial Sequence
  Description of Artificial Sequence: Synthetic polypeptide
MAADGYLPDWLEDNLSEGIREWWDLKPGAPKPKANQQKQDDGRGLVLPGYKYLGPFNGLDKGEPVNAADAAALEHDKAYDQQLKAGDNPYLRYNHADAEFQERLQEDTSFGGNLGRAVFQAKKRVLEPLGLVEEGAKTAPGKKRPVEPSPQRSPDSSTGIGKKGQQPAKKRLNFGQTGDSESVPDPQPIGEPPAGPSGVGSLTMASGGGAPVADNNEGADGVGSSSGNWHCDSQWLGDRVITTSTRTWALPTYNNHLYKQISSASTGASNDNHYFGYSTPWGYFDFNRFHCHFSPRDWQRLINNNWGFRPKRLNFKLFNIQVKEVTDNDGVKTIANNLTSTIQVFTDSEYQLPYVLGSAHQGCLPPFPADVFMIPQYGYLTLNNGSQAVGRSSFYCLEYFPSQMLRTGNNFTFSYTFEDVPFHSSYAHSQSLDRLMNPLIDQYLYYLSRTQTTGGTANTQTLGFSQGGPNTMANHAKNWLPGPCYRQQRVSTTTGQNNNSNFAWTAGTKYHLNGRNSLANPGIAMATHKDDKERFFPSNGILIFGKQNAARDNADYSDVMLTSEEEIKTTNPVATEEYGIVADNLQQQNTAPQIGTVNSQGALPGMVWQNRDVYLQGPIWAKIPHTDGNFHPSPLMGGFGLKHPPPQILIKNTPVPADPPTTFNQSKLNSFITQYSTGQVSVEIEWELQKENSKRWNPEIQYTSNYYKSTSVDFAVNTEGVYSEPHPIGTRYLTRPL

SEQ ID NO: 1068 - protein, 736 aa, Artificial Sequence
  Description of Artificial Sequence: Synthetic polypeptide
MAADGYLPDWLEDTLSEGIRQWWKLKPGPPPPKPAERHKDDSRGLVLPGYKYLGPFNGLDKGEPVNEADAAALEHDKAYDRQLDSGDNPYLKYNHADAEFQERLKEDTSFGGNLGRAVFQAKKRVLEPLGLVEEPVKTAPGKKRPVEHSPVEPDSSSGTGKAGQQPAKKRLNFGQTGDSESVPDPQPLGEPPATPAAVGPTTMASGGGAPMADNNEGADGVGNASGNWHCDSTWLGDRVITTSTRTWALPTYNNHLYKQISSASTGASNDNHYFGYSTPWGYFDFNRFHCHFSPRDWQRLINNNWGFRPKRLNFKLFNIQVKEVTQNEGTKTIANNLTSTIQVFTDSEYQLPYVLGSAHQGCLPPFPADVFMIPQYGYLTLNNGSQAVGRSSFYCLEYFPSQMLRTGNNFQFTYTFEDVPFHSSYAHSQSLDRLMNPLIDQYLYYLSRTQTTGGTANTQTLGFSQGGPNTMANQAKNWLPGPCYRQQRVSTTTGQNNNSNFAWTAGTKYHLNGRNSLANPGIAMATHKDDKERFFPSNGILIFGKQNAARDNADYSDVMLTSEEEIKTTNPVATEEYGIVADNLQQQNTAPQIGTVNSQGALPGMVWQNRDVYLQGPIWAKIPHTDGNFHPSPLMGGFGLKHPPPQILIKNTPVPADPPTTFNQSKLNSFITQYSTGQVSVEIEWELQKENSKRWNPEIQYTSNYYKSTSVDFAVNTEGVYSEPHPIGTRYLTRPL

SEQ ID NO: 1069 - protein, 736 aa, Artificial Sequence
  Description of Artificial Sequence: Synthetic polypeptide
MAADGYLPDWLEDNLSEGIREWWALKPGAPKPKANQQKQDDGRGLVLPGYKYLGPFNGLDKGEPVNAADAAALEHDKAYDQQLQAGDNPYLRYNHADAEFQERLQGDTSFGGNLGRAVFQAKKRVLEPLGLVEEGAKTAPGKKRPVEQSPQEPDSSSGIGKTGQQPAKKRLNFGQTGDSESVPDPQPLGEPPATPAAVGPTTMASGGGAPMADNNEGADGVGNASGNWHCDSTWLGDRVITTSTRTWALPTYNNHLYKQISSASTGASNDNHYFGYSTPWGYFDFNRFHCHFSPRDWQRLINNNWGFRPKRLNFKLFNIQVKEVTDNNGVKTIANNLTSTIQVFTDSEYQLPYVLGSAHQGCLPPFPADVFMIPQYGYLTLNNGSQAVGRSSFYCLEYFPSQMLRTGNNFQFTYTFEDVPFHSSYAHSQSLDRLMNPLIDQYLYYLSRTQTTGGTANTQTLGFSQGGPNTMANQAKNWLPGPCYRQQRVSTTTGQNNNSNFAWTAGTKYHLNGRNSLANPGIAMATHKDDKERFFPSNGILIFGKQNAARDNADYSDVMLTSEEEIKTTNPVATEEYGIVADNLQQQNTAPQIGTVNSQGALPGMVWQNRDVYLQGPIWAKIPHTDGNFHPSPLMGGFGLKHPPPQILIKNTPVPADPPTTFNQSKLNSFITQYSTGQVSVEIEWELQKENSKRWNPEIQYTSNYYKSTSVDFAVNTEGVYSEPHPIGTRYLTRPL

SEQ ID NO: 1070 - protein, 738 aa, Artificial Sequence
  Description of Artificial Sequence: Synthetic polypeptide
MAADGYLPDWLEDTLSEGIRQWWKLKPGPPPPKPAERHKDDSRGLVLPGYKYLGPFNGLDKGEPVNAADAAALEHDKAYDQQLKAGDNPYLRYNHADAEFQERLKEDTSFGGNLGRAVFQAKKRVLEPLGLVEEGAKTAPGKKRPVEPSPQRSPDSSTGIGKKGQQPARKRLNFGQTGDSESVPDPQPLGEPPAAPSGVGPNTMAAGGGAPMADNNEGADGVGSSSGNWHCDSQWLGDRVITTSTRTWALPTYNNHLYKQISNSTSGGSSNDNAYFGYSTPWGYFDFNRFHCHFSPRDWQRLINNNWGFRPKRLNFKLFNIQVKEVTDNNGVKTIANNLTSTVQVFTDSEYQLPYVLGSAHQGCLPPFPADVFMIPQYGYLTLNNGSQAVGRSSFYCLEYFPSQMLRTGNNFTFSYTFEDVPFHSSYAHSQSLDRLMNPLIDQYLYYLSRTQTTGGTANTQTLGFSQGGPNTMANQAKNWLPGPCYRQQRVSTTTGQNNNSNFAWTAGTKYHLNGRNSLANPGIAMATHKDDKERFFPSNGILIFGKQNAARDNADYSDVMLTSEEEIKTTNPVATEEYGIVADNLQQQNTAPQIGTVNSQGALPGMVWQNRDVYLQGPIWAKIPHTDGHFHPSPLMGGFGLKHPPPQILIKNTPVPANPPTTFNQSKLNSFITQYSTGQVSVEIEWELQKENSKRWNPEVQYTSNYAKSANVDFTVDNNGLYTEPRPIGTRYLTRPL

SEQ ID NO: 1071 - protein, 738 aa, Artificial Sequence; identical to SEQ ID NO: 1070
  Description of Artificial Sequence: Synthetic polypeptide

SEQ ID NO: 1072 - protein, 736 aa, Artificial Sequence
  Description of Artificial Sequence: Synthetic polypeptide
MAADGYLPDWLEDNLSEGIREWWALKPGAPKPKANQQKQDDGRGLVLPGYKYLGPFNGLDKGEPVNAADAAALEHDKAYDQQLKAGDNPYLRYNHADAEFQERLQEDTSFGGNLGRAVFQAKKRLLEPLGLVEEGAKTAPGKKRPVEQSPQEPDSSSGIGKTGQQPAKKRLNFGQTGDSESVPDPQPLGEPPATPAAVGPTTMASGGGAPMADNNEGADGVGNSSGNWHCDSTWMGDRVITTSTRTWALPTYNNHLYKQISSASTGASNDNHYFGYSTPWGYFDFNRFHCHFSPRDWQRLINNNWGFRPKRLNFKLFNIQVKEVTQNEGTKTIANNLTSTIQVFTDSEYQLPYVLGSAHQGCLPPFPADVFIIPQYGYLTLNNGSQAVGRSSFYCLEYFPSQMLRTGNNFTFSYTFEDVPFHSSYAHSQSLDRLMNPLIDQYLYYLSRTQTTGGTANTQTLGFSQGGPNTMANQAKNWLPGPCYRQQRVSTTTGQNNNSNFAWTAGTKYHLNGRNSLANPGIAMATHKDDKERFFPSNGILIFGKQNAARDNADYSDVMLTSEEEIKTTNPVATEEYGIVADNLQQQNTAPQIGTVNSQGALPGMVWQNRDVYLQGPIWAKIPHTDGNFHPSPLMGGFGLKHPPPQILIKNTPVPADPPTTFNQSKLNSFITQYSTGQVSVEIEWELQKENSKRWNPEIQYTSNYYKSTSVDFAVNTEGVYSEPHPIGTRYLTRPL

SEQ ID NO: 1073 - protein, 736 aa, Artificial Sequence
  Description of Artificial Sequence: Synthetic polypeptide
MAADGYLPDWLEDNLSEGIREWWALKPGAPKPKANQQKQDDGRGLVLPGYKYLGPFNGLDKGEPVNAADAAALEHDKAYDQQLKAGDNPYLRYNHADAEFQERLQEDTSFGGNLGRAVFQAKKRVLEPFGLVEEAAKTAPGKKRPVEQSPQEPDSSSGIGKTGQQPAKKRLNFGQTGDSESVPDPQPLGEPPATPAAVGPTTMASGGGAPMADNNEGADGVGNASGNWHCDSTWLGDRVITTSTRTWALPTYNNHLYKQISSASTGASNDNHYFGYSTPWGYFDFNRFHCHFSPRDWQRLINNNWGFRPKRLNFKLFNIQVKEVTQNEGTKTIANNLTSTIQVFTDSEYQLPYVLGSAHQGCLPPFPADVFMIPQYGYLTLNNGSQAVGRSSFYCLEYFPSQMLRTGNNFTFSYTFEDVPFHSSYAHSQSLDRLMNPLIDQYLYYLSRTQTTGGTANTQTLGFSQGGPNTMANHAKNWLPGPCYRQQRVSTTTGQNNNSNFAWTAGTKYHLNGRNSLANPGIAMATHKDDKERFFPSNGILIFGKQNAARDNADYSDVMLTSEEEIKTTNPVATEEYGIVADNLQQQNTAPQIGTVNSQGALPGMVWQNRDVYLQGPIWAKIPHTDGNFHPSPLMGGFGLKHPPPQILIKNTPVPADPPTTFNQSKLNSFITQYSTGQVSVEIEWELQKENSKRWNPEIQYTSNYYKSTSVDFAVNTEGVYSEPHPIGTRYLTRPL

SEQ ID NO: 1074 - protein, 736 aa, Artificial Sequence
  Description of Artificial Sequence: Synthetic polypeptide
MAADGYLPDWLEDNLSEGIREWWALKPGAPKPKANQQKQDDGRGLVLPGYKYLGPFNGLDKGEPVNEADAAALEHDKAYDQQLKAGDNPYLRYNHADAEFQERLQEDTSFGGNLGRAVFQAKKRLLEPLGLVEEAAKTAPGKKRPVEQSPQEPDSSAGIGKSGAQPAKKRLNFGQTGDSESVPDPQPLGEPPATPAAVGPTTMASGGGAPMADNNEGADGVGNASGNWHCDSTWLGDRVITTSTRTWALPTYNNHLYKQISSASTGASNDNHYFGYSTPWGYFDFNRFHCHFSPRDWQRLINNNWGFRPKRLNFKLFNIQVKEVTDNDGVKTIANNLTSTIQVFTDSEYQLPYVLGSAHQGCLPPFPADVFMIPQYGYLTLNNGSQAVGRSSFYCLEYFPSQMLRTGNNFQFTYTFEDVPFHSSYAHSQSLDRLMNPLIDQYLYYLSRTQTTGGTANTQTLGFSQGGPNTMANQAKNWLPGPCYRQQRVSTTTGQNNNSNFAWTAGTKYHLNGRNSLANPGIAMATHKDDKERFFPSNGILIFGKQNAARDNADYSDVMLTSEEEIKTTNPVATEEYGIVADNLQQQNTAPQIGTVNSQGALPGMVWQNRDVYLQGPIWAKIPHTDGNFHPSPLMGGFGLKHPPPQILIKNTPVPADPPTTFNQSKLNSFITQYSTGQVSVEIEWELQKENSKRWNPEIQYTSNYYKSTSVDFAVNTEGVYSEPHPIGTRYLTRPL

SEQ ID NO: 1075 - protein, 736 aa, Artificial Sequence
  Description of Artificial Sequence: Synthetic polypeptide
MAADGYLPDWLEDNLSEGIREWWALKPGAPKPKANQQKQDDGRGLVLPGYKYLGPFNGLDKGEPVNAADAAALEHDKAYDQQLKAGDNPYLRYNHADAEFQERLQEDTSFGGNLGRAVFQAKKRVLEPLGLVEEGAKTAPGKKRPVEQSPQEPDSSAGIGKTGAQPAKKRLNFGQTGDSESVPDPQPLGEPPATPAAVGPTTMASGGGAPMADNNEGADGVGSASGNWHCDSTWLGDRVITTSTRTWALPTYNNHLYKQISSASTGASNDNHYFGYSTPWGYFDFNRFHCHFSPRDWQRLINNNWGFRPKRLNFKLFNIQVKEVTDNNGVKTIANNLTSTIQVFTDSEYQLPYVLGSAHQGCLPPFPADVFMIPQYGYLTLNNGSQAVGRSSFYCLEYFPSQMLRTGNNFTFSYTFEDVPFHSSYAHSQSLDRLMNPLIDQYLYYLSRTQTTGGTANTQTLGFSQGGPNTMANQAKNWLPGPCYRQQRVSTTTGQNNNSNFAWTAGTKYHLNGRNSLANPGIAMATHKDDKERFFPSNGILIFGKQNAARDNADYSDVMLTSEEEIKTTNPVATEEYGIVADNLQQQNTAPQIGTVNSQGALPGMVWQNRDVYLQGPIWAKIPHTDGNFHPSPLMGGFGLKHPPPQILIKNTPVPADPPTTFNQSKLNSFITQYSTGQVSVEIEWELQKENSKRWNPEIQYTSNYYKSTSVDFAVNTEGVYSEPHPIGTRYLTRPL

SEQ ID NO: 1076 - protein, 736 aa, Artificial Sequence
  Description of Artificial Sequence: Synthetic polypeptide
MAADGYLPDWLEDNLSEGIREWWDLKPGAPKPKANQQKQDDGRGLVLPGYKYLGPFNGLDKGEPVNAADAAALEHDKAYDQQLKAGDNPYLRYNHADAEFQERLQEDTSFGGNLGRAVFQAKKRLLEPLGLVEEAAKTAPGKKRPVEQSPQEPDSSAGIGKSGAQPAKKRLNFGQTGDTESVPDPQPIGEPPAAPSGVGPNTMAAGGGAPMADNNEGADGVGSSSGNWHCDSQWLGDRVITTSTRTWALPTYNNHLYKQISSASTGASNDNHYFGYSTPWGYFDFNRFHCHFSPRDWQRLINNNWGFRPKRLNFKLFNIQVKEVTQNEGTKTIANNLTSTIQVFTDSEYQLPYVLGSAHQGCLPPFPADVFMIPQYGYLTLNNGSQAVGRSSFYCLEYFPSQMLRTGNNFQFTYTFEDVPFHSSYAHSQSLDRLMNPLIDQYLYYLSRTQTTGGTANTQTLGFSQGGPNTMANHAKNWLPGPCYRQQRVSTTTGQNNNSNFAWTAGTKYHLNGRNSLANPGIAMATHKDDKERFFPSNGILIFGKQNAARDNADYSDVMLTSEEEIKTTNPVATEEYGIVADNLQQQNTAPQIGTVNSQGALPGMVWQNRDVYLQGPIWAKIPHTDGNFHPSPLMGGFGLKHPPPQILIKNTPVPADPPTTFNQSKLNSFITQYSTGQVSVEIEWELQKENSKRWNPEIQYTSNYYKSTSVDFAVNTEGVYSEPHPIGTRYLTRPL

SEQ ID NO: 1077 - protein, 737 aa, Artificial Sequence; identical to SEQ ID NO: 1059
  Description of Artificial Sequence: Synthetic polypeptide

SEQ ID NO: 1078 - protein, 737 aa, Artificial Sequence
  Description of Artificial Sequence: Synthetic polypeptide
MAADGYLPDWLEDNLSEGIREWWALKPGAPKPKANQQKQDDGRGLVLPGYKYLGPFNGLDKGEPVNAADAAALEHDKAYDQQLKAGDNPYLRYNHADAEFQERLKEDTSFGGNLGRAVFQAKKRVLEPFGLVEEGAKTAPGKKRPVEQSPQEPDSSSGIGKTGQQPAKKRLNFGQTGDSESVPDPQPLGEPPAAPSGVGPNTMAAGGGAPMADNNEGADGVGSSSGNWHCDSQWLGNRVITTSTRTWALPTYNNHLYKQISNSTSGGSSNDNAYFGYSTPWGYFDFNRFHCHFSPRDWQRLINNNWGFRPKRLNFKLFNIQVKEVTDNNGVKTIANNLTSTVQVFTDSEYQLPYVLGSAHQGCLPPFPADVFMIPQYGYLTLNNGSQAVGRSSFYCLEYFPSQMLRTGNNFQFTYTFEDVPFHSSYAHSQSLDRLMNPLIDQYLYYLSRTQTTGGTANTQTLGFSQGGPNTMANQAKNWLPGPCYRQQRVSTTTGQNNNSNFAWTAGTKYHLNGRNSLANPGIAMATHKDDKERFFPSNGILIFGKQNAARDNADYSDVMLTSEEEIKTTNPVATEEYGIVADNLQQQNTAPQIGTVNSQGALPGMVWQNRDVYLQGPIWAKIPHTDGNFHPSPLMGGFGLKHPPPQILIKNTPVPADPPTTFNQSKLNSFITQYSTGQVSVEIEWELQKENSKRWNPEIQYTSNYYKSTSVDFAVNTEGVYSEPHPIGTRYLTRPL

SEQ ID NO: 1079 - protein, 736 aa, Artificial Sequence
  Description of Artificial Sequence: Synthetic polypeptide
MAADGYLPDWLEDNLSEGIREWWDLKPGAPKPKANQQKQDDGRGLVLPGYKYLGPFNGLDRGEPVNAADAAALEHDKAYDQQLKAGDNPYLRYNHADAEFQERLQEDTSFGGNLGRAVFQAKKRVLEPLGLVEEGAKTAPGKKRPVEQSPQEPDSSSGIGKTGQQPAKKRLNFGQTGDSESVPDPQPLGEPPATPAAVGPTTMASGGGAPMADNNEGADGVGNASGNWHCDSTWLGDRVITTSTRTWALPTYNNHLYKQISSASTGASNDNHYFGYSTPWGYFDFNRFHCHFSPRDWQRLINNNWGFRPKRLNFKLFNIQVKEVTDNNGVKTIANNLTSTIQVFTDSEYQLPYVLGSAHQGCLPPFPADVFMIPQYGYLTLNNGSQAVGRSSFYCLEYFPSQMLRTGNNFQFTYTFEDVPFHSSYAHSQSLDRLMNPLIDQYLYYLSRTQTTGGTANTQTLGFSQGGPNTMANQAKNWLPGPCYRQQRVSTTTGQNNNSNFAWTAGTKYHLNGRNSLANPGIAMATHKDDKERFFPSNGILIFGKQNAARDNADYSDVMLTSEEEIKTTNPVATEEYGIVADNLQQQNTAPQIGTVNSQGALPGMVWQNRDVYLQGPIWAKIPHTDGNFHPSPLMGGFGLKHPPPQILIKNTPVPADPPTTFNQSKLNSFITQYSTGQVSVEIEWELQKENSKRWNPEIQYTSNYYKSTSVDFAVNTEGVYSEPHPIGTRYLTRPL

SEQ ID NO: 1080 - protein, 736 aa, Artificial Sequence
  Description of Artificial Sequence: Synthetic polypeptide
MAADGYLPDWLEDNLSEGIREWWDLKPGAPKPKANQQKQDDGRGLVLPGYKYLGPFNGLDKGEPVNAADAAALEHDKAYDQQLKAGDNPYLRYNHADAEFQERLQEDTSFGGNLGRAVFQAKKRVLEPLGLVEEGAKTAPGKKRPVEQSPQEPDSSSGIGKKGQQPARKRLNFGQTGDSESVPDPQPLGEPPAAPSGVGSLTMASGGGAPMADNNEGADGVGNASGNWHCDSTWLGDRVITTSTRTWALPTYNNHLYKQISSASTGASNDNHYFGYSTPWGYFDFNRFHCHFSPRDWQRLINNNWGFRPKRLNFKLFNIQVKEVTQNEGTKTIANNLTSTVQVFTDSDYQLPYVLGSAHQGCLPPFPADVFMIPQYGYLTLNNGSQAVGRSSFYCLEYFPSQMLRTGNNFQFTYTFEDVPFHSSYAHSQSLDRLMNPLIDQYLYYLSRTQTTGGTANTQTLGFSQGGPNTMANQAKNWLPGPCYRQQRVSTTTGQNNNSNFAWTAGTKYHLNGRNSLSNPGIAMATHKDDKERFFPSNGILIFGKQNAARDNADYSDVMLTSEEEIKTTNPVATEEYGIVADNLQQQNTAPQIGTVNSQGALPGMVWQNRDMYLQGPIWAKIPHTDGNFHPSPLMGGFGLKHPPPQILIKNTPVPADPPTTFNQSKLNSFITQYSTGQVSVEIEWELQKENSKRWNPEIQYTSNYYKSTSVDFAVNTEGVYSEPHPIGTRYLTRPL

SEQ ID NO: 1081 - protein, 736 aa, Artificial Sequence
  Description of Artificial Sequence: Synthetic polypeptide
MAADGYLPDWLEDNLSEGIREWWALKPGAPKPKANQQKQDDGRGLVLPGYKYLGPFNGLDKGEPVNAADAAALEHDKAYDQQLKAGDNPYLRYNHADAEFQERLQEDTSFGGNLGRAVFQAKKRVLEPFGLVEEGAKTAPGKKRPVEQSPQEPDSSSGIGKTGQQPAKKRLNFGQTGGSESVPDPQPLGEPPATPAAVGPTTMAAGGGAPMADNNEGADGVGSSSGNWHCDSTWLGDRVITTSTRTWALPTYNNHLYKQISSASTGASNDNHYFGYSTPWGYFDFNRFHCHFSPRDWQRLINNNWGFRPKRLNFKLFNIQVKEVTDNNGVKTIANNLTSTVQVFTDSEYQLPYVLGSAHQGCLPPFPADVFMIPQYGYLTLNNGSQAVGRSSFYCLEYFPSQMLRTGNNFTFSYTFEEVPFHSSYAHSQSLDRLMNPLIDQYLYYLSRTQTTGGTANTQTLGFSQGGPNTMANQAKNWLPGPCYRQQRVSTTTGQNNNSNFAWTAGTKYHLNGRNSLANPGIAMASHKDDKERFFPSNGILIFGKQNAARDNADYSDVMLTSEEEIKTTNPVATEEYGIVADNLQQQNTAPQIGTVNSQGALPGMVWQNRDVYLQGPIWAKIPHTDGNFHPSPLMGGFGLKHPPPQILIKNTPVPADPPTTFNQSKLNSFITQYSTGQVSVEIEWELQKENSKRWNPEIQYTSNYYKSTSVDFAVNTEGVYSEPHPIGTRYLTRPL

SEQ ID NO: 1082 - DNA, 2211 bp, Artificial Sequence
  Description of Artificial Sequence: Synthetic polynucleotide
atggctgccgatggttatcttccagattggctcgaggacaacctctctgagggcattcgcgagtggtgggacttgaaacctgcatccccgaaacccaaagccaaccagcaaaagcaggacgacggccggggtctggtgcttcctggctacaagtacctcggacccttcaacggactcgacaagggggagcccgtcaacgcggcggacgcagcggccctcgagcacgacaaggcctacgaccagcagctcaaagcgggtgacaatccgtacctgcggtataaccacgccgacgccgagtttcaggagcgtctgcaagaagatacgtcttttgggggcaacctcgggcgagcagtcttccaggccaaaaagaggcttcttgaacctcttggtctggttgaggaagcggctaagacggctcctggaaagaagaggcctgtagagcagtctcctcaggaaccggactcctccgcgggtattggcaaatcgggtgcacagcccgccaaaaagagactcaatttcggtcagactggcggcacagagtcagttccagaccctcaacctctcggagaacctccagcagcgccctctggtgtgggacctaatacaatggctgcaggcggtggcgcaccaatggcagacaataacgaaggcgccgacggagtgggtagttcctcgggaaattggcattgcgattccacatggctgggcgacagagtcatcaccaccagcaccagaacctgggccctgcccacttacaacaaccatctctacaagcaaatctccagtgcttcaacgggggccagcaacgacaaccactacttcggctacagcaccccctgggggtattttgatttcaacagattccactgccacttctcaccacgtgactggcagcgactcatcaacaacaactggggattccggcccaagagactcagcttcaagctcttcaacatccaggtcaaggaggtcacgcagaatgaaggcaccaagaccatcgccaataacctcaccagcaccatccaggtgtttacggactcggagtaccagctgccgtacgttctcggctctgcccaccagggctgcctgcctccgttcccggcggacgtgttcatgattccccagtacggatacctaacactcaacaacggtagtcaggccgtgggacgctcctccttctactgcctggaatactttccttcgcagatgctgagaaccggcaacaacttccagtttacttacaccttcgaggacgtgcctttccacagcagctacgcccacagccagagcttggaccggctgatgaatcctctgattgaccagtacctgtactacttgtctcggactcaaacaacaggaggcacggcaaatacgcagactctgggcttcagccaaggtgggcctaatacaatggccaatcaggcaaagaactggctgccaggaccctgttaccgccaacaacgcgtctcaacgacaaccgggcaaaacaacaatagcaactttgcctggactgctgggaccaaataccatctgaatggaagaaattcattggctaatcctggcatcgctatggcaacacacaaagacgacaaggagcgtttttttcccagtaacgggatcctgatttttggcaaacaaaatgctgccagagacaatgcggattacagcgatgtcatgctcaccagcgaggaagaaatcaaaaccactaaccctgtggctacagaggaatacggtatcgtggcagataacttgcagcagcaaaacacggctcctcaaattggaactgtcaacagccagggggccttacccggtatggtctggcagaaccgggacgtgtacctgcagggtcccatctgggccaagattcctcacacggacggcaacttccacccgtctccgctgatgggcggctttggcctgaaacatcctccgcctcagatcctgatcaagaacacgcctgtacctgcggatcctccgaccaccttcaaccagtcaaagctgaactctttcatcacgcaatacagcaccggacaggtcagcgtggaaattgaatgggagctgcagaaggaaaacagcaagcgctggaaccccgagatccagtacacctccaactactacaaatctacaagtgtggactttgctgttaatacagaaggcgtgtactctgaaccccaccccattggcacccgttacctcacccgtcccctgtaa

SEQ ID NO: 1083 - DNA, 2211 bp, Artificial Sequence
  Description of Artificial Sequence: Synthetic polynucleotide
atggctgccgatggttatcttccagattggctcgaggacaacctctctgagggcattcgcgagtggtgggacttgaaacctggagccccgaaacccaaagccaaccagcaaaagcaggacgacggccggggtctggtgcttcctggctacaagtacctcggacccttcaacggactcgacaagggggagcccgtcaacgcggcggacgcagcggccctcgagcacgacaaggcctacgaccagcagctcaaagcgggtgacaatccgtacctgcggtataaccacgccgacgccgagtttcaggagcgtctgcaagaagatacgtcttttgggggcaacctcgggcgagcagtcttccaggccaagaagagggttctcgaaccttttggtctggttgaggaaggcgctaagacggctcctggaaagaaacgtccggtagagcagtcgccacaagagccagactcctcctcgggcattggcaagacaggccagcagcccgctaaaaagagactcaattttggtcagactggcgactcagagtcagtccccgacccacaacctctcggagaacctccagcaacccccgctgctgtgggacctactacaatggcttcaggtggtggcgcaccaatggcagacaataacgaaggcgccgacggagtgggtaatgcctcaggaaattggcattgcgattcccaatggctgggggacagagtcatcaccaccagcacccgaacctgggccctgcccacctacaacaatcacctctacaagcaaatctccagtgcttcaacgggggccagcaacgacaaccactacttcggctacagcaccccctgggggtattttgatttcaacagattccactgccatttctcaccacgtgactggcagcgactcatcaacaacaattggggattccggcccaagagactcaacttcaaactcttcaacatccaagtcaaggaggtcacgcagaatgaaggcaccaagaccatcgccaataacctcaccagcaccatccaggtgtttacggactcggagtaccagctgccgtacgttctcggctccgcccaccagggctgcctgcctccgttcccggcggacgtgttcatgattccccagtacggctacctaacactcaacaacggtagtcaggccgtgggacgctcctccttctactgcctggaatactttccttcgcagatgctgagaaccggcaacaacttccagtttacttacaccttcgaggacgtgcctttccacagcagctacgcccacagccagagcttggaccggctgatgaatcctctgattgaccagtacctgtactacttgtctcggactcaaacaacaggaggcacggcaaatacgcagactctgggcttcagccaaggtgggcctaatacaatggccaatcaggcaaagaactggctgccaggaccctgttaccgccaacaacgcgtctcaacgacaaccgggcaaaacaacaatagcaactttgcctggactgctgggaccaaataccatctgaatggaagaaattcattggctaatcctggcatcgctatggcaacacacaaagacgacaaggagcgtttttttcccagtaacgggatcctgatttttggcaaacaaaatgctgccagagacaatgcggattacagcgatgtcatgctcaccagcgaggaagaaatcaaaaccactaaccctgtggctacagaggaatacggtatcgtggcagataacttgcagcagcaaaacacggctcctcaaattggaactgtcaacagccagggggccttacccggtatggtctggcagaaccgggacgtgtacctgcagggtcccatctgggccaagattcctcacacggacggcaacttccacccgtctccgctgatgggcggctttggcctgaaacatcctccgcctcagatcctgatcaagaacacgcctgtacctgcggatcctccgaccaccttcaaccagtcaaagctgaactctttcatcacgcaatacagcaccggacaggtcagcgtggaaattgaatgggagctgcagaaggaaaacagcaagcgctggaaccccgagatccagtacacctccaactactacaaatctacaagtgtggactttgctgttaatacagaaggcgtgtactctgaaccccaccccattggcacccgttacctcacccgtcccctgtaa

SEQ ID NO: 1084 - DNA, 2211 bp, Artificial Sequence
  Description of Artificial Sequence: Synthetic polynucleotide
atggctgccgatggttatcttccagattggctcgaggacaacctctctgagggcattcgcgagtggtgggacttggaacctggagccccgaagcccaaagccaaccagcaaaagcaggacgacggccggggtctggtgcttcctggctacaagtacctcggacccttcaacggactcgacaagggggagcccgtcaacgcggcggacgcagcggccctcgagcacgacaaggcctacgaccagcagctcaaagcgggtgacaatccgtacctgcggtataaccacgccgacgccgagtttcaggagcgtctgcaagaagatacgtcttttgggggcaacctcgggcgagcagtcttccaggccaagaagcgggttctcgaacctctcggtctggttgaggaaggcgctaagacggctcctggaaagaaacgtccggtagagcagtcgccacaagagccagactcctcctcgggcatcggcaagacaggccagcagcccgctaaaaagagactcaattttggtcagactggcgactcagagtcagtccccgatccacaacctctcggagaacctccagcaacccccgctgctgtgggacctactacaatggcttcaggcggtggcgcaccaatggcagacaataacgaaggcgccgacggagtgggtaatgcctcaggaaattggcattgcgattccacatggctgggcgacagagtcatcaccaccagcacccgcacctgggccttgcccacctacaataaccacctctacaagcaaatctccagtgcttcaacaggggccagcaacgacaaccactacttcggctacagcaccccctgggggtattttgacttcaacagattccactgccacttctcaccacgtgactggcagcgactcatcaacaacaactggggattccggcctaagcgactcaacttcaagctcttcaacattcaggtcaaagaggttacggacaacaatggagtcaagaccatcgccaataaccttaccagcacggtccaggtcttcacggactcggagtaccagttgccgtacgtcctcggctctgcgcaccagggctgcctccctccgttcccggcggacgtgttcatgattccgcagtacggctacctaacgctcaacaacggtagtcaggccgtgggacgctcctccttctactgcctggaatactttccttcgcagatgctgagaaccggcaacaacttccagtttacttacaccttcgaggacgtgcctttccacagcagctacgcccacagccagagcttggaccggctgatgaatcctctgattgaccagtacctgtactacttgtctcggactcaaacaacaggaggcacggcaaatacgcagactctgggcttcagccaaggtgggcctaatacaatggccaatcaggcaaagaactggctgccaggaccctgttaccgccaacaacgcgtctcaacgacaaccgggcaaaacaacaatagcaactttgcctggactgctgggaccaaataccatctgaatggaagaaattcattggctaatcctggcatcgctatggcaacacacaaagacgacaaggagcgtttttttcccagtaacgggatcctgatttttggcaaacaaaatgctgccagagacaatgcggattacagcgatgtcatgctcaccagcgaggaagaaatcaaaaccactaaccctgtggctacagaggaatacggtatcgtggcagataacttgcagcagcaaaacacggctcctcaaattggaactgtcaacagccagggggccttacccggtatggtctggcagaaccgggacgtgtacctgcagggtcccatctgggccaagattcctcacacggacggcaacttccacccgtctccgctgatgggcggctttggcctgaaacatcctccgcctcagatcctgatcaagaacacgcctgtacctgcggatcctccgaccaccttcaaccagtcaaagctgaactctttcatcacgcaatacagcaccggacaggtcagcgtggaaattgaatgggagctgcagaaggaaaacagcaagcgctggaaccccgagatccagtacacctccaactactacaaatctacaagtgtggactttgctgttaatacagaaggcgtgtactctgaaccccaccccattggcacccgttacctcacccgtcccctgtaa

SEQ ID NO: 1085 - DNA, 2211 bp, Artificial Sequence
  Description of Artificial Sequence: Synthetic polynucleotide
atggctgccgatggttatcttccagattggctcgaggacactctctctgaaggaataagacagtggtggaagctcaaacctggcccaccaccaccaaagcccgcagagcggcataaggacgacagcaggggtcttgtgcttcctgggtacaagtacctcggacccttcaacggactcgacaagggagagccggtcaacgaggcagacgccgcggccctcgagcacgacaaagcctacgaccggcagctcgacagcggagacaacccgtacctcaagtacaaccacgccgacgcggagtttcaggagcgccttaaagaagatacgtcttttgggggcaacctcgggcgagcagtcttccaggccaagaagagggttctcgaaccttttggtctggttgaggaaggtgctaagacggctcctggaaagaaacgtccggtagagcagtcgccacaagagccagactcctcctcgggcattggcaagacaggccagcagcccgctaaaaagagactcaattttggtcagactggcgactcagagtcagtccccgacccacaacctctcggagaacctccagcaacccccgctgctgtgggacctactacaatggcttcaggcggtggcgcaccaatggcagacaataacgaaggcgccgacggagtgggtaatgcctcaggaaattggcattgcgattccacatggctgggcgacagagtcatcaccaccagcacccgaacatgggccttgcccacctataacaaccacctctacaagcaaatctccagtgcttcaacgggggccagcaacgacaaccactacttcggctacagcaccccctgggggtattttgacttcaacagattccactgccacttctcaccacgtgactggcagcgactcatcaacaacaactggggattccggcctaagcgactcaacttcaagctcttcaacattcaggtcaaagaggttacggacaacaatggagtcaagaccatcgccaataaccttaccagcacggtccaggtcttcacggactcagactatcagctcccgtacgtgctcgggtcggctcacgagggctgcctcccgccgttcccagcggacgttttcatgattcctcagtacggctacctaacactcaacaacggtagtcaggccgtgggacgctcctccttctactgcctggaatactttccttcgcagatgctgagaaccggcaacaacttccagtttacttacaccttcgaggacgtgcctttccacagcagctacgcgcacagccagagtctggaccggctgatgaatcctctgattgaccagtacctgtactacttgtctcggactcaaacaacaggaggcacggcaaatacgcagactctgggcttcagccaaggtgggcctaatacaatggccaatcaggcaaagaactggctgccaggaccctgttaccgccaacaacgcgtctcaacgacaaccgggcaaaacaacaatagcaactttgcctggactgctgggaccaaataccatctgaatggaagaaattcattggctaatcctggcatcgctatggcaacacacaaagacgacaaggagcgtttttttcccagtaacgggatcctgattttcggcaaacaaaatgctgccagagacaatgcggattacagcgatgtcatgctcaccagcgaggaagaaatcaaaaccactaaccctgtggctacagaggaatacggtatcgtggcagataacttgcagcagcaaaacacggctcctcaaattggaactgtcaacagccagggggccttacccggtatggtctggcagaaccgggacgtgtacctgcagggtcccatctgggccaagattcctcacacggacggcaacttccacccgtctccgctgatgggcggctttggcctgaaacatcctccgcctcagatcctgatcaagaacacgcctgtacctgcggatcctccgaccaccttcaaccagtcaaagctgaactctttcatcacgcaatacagcaccggacaggtcagcgtggaaattgaatgggagctgcagaaggaaaacagcaagcgctggaaccccgagatccagtacacctccaactactacaaatctacaagtgtggactttgctgttaatacagaaggcgtgtactctgaaccccaccccattggcaccagatacctgactcgtaatctgtaa

SEQ ID NO: 1086 - DNA, 2208 bp, Artificial Sequence
  Description of Artificial Sequence: Synthetic polynucleotide
atggctgccgatggttatcttccagattggctcgaggacactctctctgaaggaataagacagtggtggaagctcaaacctggcccaccaccaccaaagcccgcagagcggcataaggacgacagcaggggtcttgtgcttcctgggtacaagtacctcggacccttcaacggactcgacaagggagagccggtcaacgaggcagacgccgcggccctcgagcacgacaaagcctacgaccggcagctcgacagcggagacaacccgtacctcaagtacaaccacgccgacgcggagtttcaggagcgccttaaagaagatacgtcttttgggggcaacctcggacgagcagtcttccaggcgaaaaagagggttcttgaacctctgggcctggttgaggaacctgttaagacggctccgggaaaaaagaggccggtagagcagtcgccacaagagccagactcctcctcgggcatcggcaagaaaggccagcagcccgctaaaaagagactcaattttggtcagactggcgactcagagtcagtccccgacccacaacctctcggagaacctccagcaacccccgctgctgtgggacctactacaatggcttcaggcggtggcgcaccaatggcggacaataacgaaggcgccgatggagtgggtaatgcctcaggaaattggcattgcgattccacatggctgggcgacagagtcatcaccaccagcacccgaacatgggccttgcccacctataacaaccacctctacaagcaaatctccagtgcttcaacgggggccagcaacgacaaccactacttcggctacagcaccccctgggggtattttgacttcaacagattccactgccacttctcaccacgtgactggcagcgactcatcaacaacaactggggattccggcctaagcgactcaacttcaagctcttcaacattcaggtcaaagaggttacggacaacaatggagtcaagaccatcgccaataaccttaccagcacggtccaggtcttcacggactcagactatcagctcccgtacgttctcggctctgcccaccagggctgcctgcctccgttcccggcggacgtgttcatgattccccagtacggctacctaacactcaacaacggtagtcaggccgtgggacgctcctccttctactgcctggaatactttccttcgcagatgctgagaaccggcaacaacttccagtttacttacaccttcgaggacgtgcctttccacagcagctacgcccacagccagagcttggaccggctgatgaatcctctgattgaccagtacctgtactacttgtctcggactcaaacaacaggaggcacggcaaatacgcagactctgggcttcagccaaggtgggcctaatacaatggccaatcaggcaaagaactggctgccaggaccctgttaccgccaacaacgcgtctcaacgacaaccgggcaaaacaacaatagcaactttgcctggactgctgggaccaaataccatctgaatggaagaaattcattggctaatcctggcatcgctatggcaacacacaaagacgacaaggagcgtttttttcccagtaacgggatcctgatttttggcaaacaaaatgctgccagagacaatgcggattacagcgatgtcatgctcaccagcgaggaagaaatcaaaaccactaaccctgtggctacagaggaatacggtatcgtggcagataacttgcagcagcaaaacacggctcctcaaattggaactgtcaacagccagggggccttacccggtatggtctggcagaaccgggacgtgtacctgcagggtcccatctgggccaagattcctcacacggacggcaacttccacccgtctccgctgatgggcggctttggcctgaaacatcctccgcctcagatcctgatcaagaacacgcctgtacctgcggatcctccgaccaccttcaaccagtcaaagctgaactctttcatcacgcaatacagcaccggacaggtcagcgtggaaattgaatgggagctgcagaaggaaaacagcaagcgctggaaccccgagatccagtacacctccaactactacaaatctacaagtgtggactttgctgttaatacagaaggcgtgtactctgaaccccaccccattggcacccgttacctcacccgtcccctg

SEQ ID NO: 1087 - DNA, 2211 bp, Artificial Sequence
  Description of Artificial Sequence: Synthetic polynucleotide
atggctgccgatggttatcttccagattggctcgaggacactctctctgaaggaataagacagtggtggaagctcaaacctggcccaccaccaccaaagcccgcagagcggcataaggacgacagcaggggtcttgtgcttcctgggtacaagtacctcggacccttcaacggactcgacaagggagagccggtcaacgaggcagacgccgcggccctcgagcacgacaaagcctacgaccagcagctccaagcgggtgacaatccgtacctgcggtataaccacgccgacgccgagtttcaggagcgtcttcaaggagatacgtcttttgggggcaacctcggacgagcagtcttccaggccaaaaagaggcttcttgaacctcttggtctggttgaggaagcggctaagacggctcctggaaagaagaggcctgtagagcagtctcctcaggaaccggactcctccgcgggtattggcaaatcgggtgcacagcccgctaaaaagagactcaatttcggtcagactggcgacacagagtcagtcccagaccctcaaccaatcggagaacctcccgcagccccctcaggtgtgggatctcttacaatggcttcaggtggtggcgcaccagtggcagacaataacgaaggtgccgatggagtgggtagttcctcgggaaattggcattgcgattcccaatggctgggggacagagtcatcaccaccagcacccgaacatgggccttgcccacctataacaaccacctctacaagcaaatctccagtgcttcaacgggggccagcaacgacaaccactacttcggctacagcaccccctgggggtattttgacttcaaccgcttccactgccacttctcaccacgtgactggcagcgactcatcaacaacaactggggattccggcccaagagactcagcttcaagctcttcaaccatccaggtcaaggaggtcacgcagaatgaaggcaccaagaccatcgccaataacctcaccagcacatccaggtgtttacggactcggagtaccagctgccgtacgttctcggctctgcccaccagggctgcctgcctccgttcccggcggacgtgttcatgattccccagtacggctacctaacactcaacaacggtagtcaggccgtgggacgctcctccttctactgcctggaatactttccttcgcagatgctgagaaccggcaacaacttccagttcacttacaccttcgaggacgtgcctttccacagcagctacgcgcacagccagagcttggaccggctgatgaatcctctgattgaccagtacctgtactacttgtctcggactcaaacaacaggaggcacggcaaatacgcagactctgggcttcagccaaggtgggcctaatacaatggccaatcaggcaaagaactggctgccaggaccctgttaccgccaacaacgcgtctcaacgacaaccgggcaaaacaacaatagcaactttgcctggactgctgggaccaaataccatctgaatggaagaaattcattgggtaatcctggcatcgctatggcaacacacaaagacgacaaggagcgtttttttcccagtaacgggatcctgatttttggcaaacaaaatgctgccagagacaatgcggattacagcgatgtcatgctcaccagcgaggaagaaatcaaaaccactaaccctgtggctacagaggaatacggtatcgtggcagataacttgcagcagcaaaacacggctcctcaaattggaactgtcaacagccagggggccttacccggtatggtctggcagaaccgggacgtgtacctgcagggtcccatctgggccaagattcctcacacggacggcaacttccacccgtctccgctgatgggcggctttggcctgaaacatcctccgcctcagatcctcatcaaaaacacacctgtacctgcggatcctccaacggccttcaaccagtcaaagctgaactctttcatcacgcaatacagcaccggacaggtcagcgtggaaattgaatgggagctgcagaaggaaaacagcaagcgctggaaccccgagatccagtacacctccaactactacaaatctacaagtgtggactttgctgttaatacagaaggcgtgtactctgaaccccaccccattggcacccgttacctcacccgtcccctgtaa

SEQ ID NO: 1088 - DNA, 2214 bp, Artificial Sequence
  Description of Artificial Sequence: Synthetic polynucleotide
atggctgccgatggttatcttccagattggctcgaggacaacctctctgagggcattcgcgagtggtgggacttgaaacatggagccccgaaacccaaagccaaccagcaaaagcaggacgacggccggggtctggtgcttcctggctacaagtacctcggacccttcaacggactcgacaagggggagcccgtcaacgcggcggatgcagcggccctcgagcacgacaaggcctacgaccagcagctcaaagcgggtgacaatccgtacctgcggtataaccacgccgacgccgagtttcaggagcgtctgcaagaagatacgtcttttgggggcaacctcgggcgagcagtcttccaggccaagaagagggttctcgaaccttttggtctggttgaggaaggtgctaagacggctcctggaaagaaacgtccggtagagcagtcgccacaagagccagactcctcctcgggcattggcaagacaggccagcagcccgctaaaaagagactcaattttggtcagactggcgactcagagtcagtccccgacccacaacctctcggagaacctccagcaacccccgctgctgtgggacctactacaatggcttcaggcggtggcgcaccaatggcagacaataacgaaggcgccgacggagtgggtaatgcctcaggaaattggcattgcgattccacatggctgggcgacagagtcatcaccaccagcacccgaacatgggccttgcccacctataacaaccacctctacaagcaaatctccaacgggacttcgggaggaagcaccaacgacaacacctacttcggctacagcaccccctgggggtattttgactttaacagattccactgccacttctcaccacgtgactggcagcgactcatcaacaacaactggggattccggcccaagagactcaacttcaaactcttcaacatccaagtcaaggaggtcacgcagaatgaaggcaccaagaccatcgccaataacctcaccagcaccatccaggtgtttacggactcggagtaccagctgccgtacgttctcggctccgcccaccagggctgcctgcctccgttcccggcggacgtgttcatgattccccagtacggctacctaacactcaacaacggtagtcaggccgtgggacgctcctccttctactgcctggaatactttccttcgcagatgctgagaacgggcaacaactttaccttcagctacacctttgaggacgttcctttccacagcagctacgctcacagccagagtctggaccgtctcatgaatcctctgattgaccagtacctgtactacttgtctcggactcaaacaacaggaggcacggcaaatacgcagactctgggcttcagccaaggtgggcctaatacaatggccaatcaggcaaagaactggctgccaggaccctgttaccgccaacaacgcgtctcaacgacaaccgggcaaaacaacaatagcaactttgcctggactgctgggaccaaataccatctgaatggaagaaattcattggctaatcctggcatcgctatggcaacacacaaagacgacaaggagcgtttttttcccagtaacgggatcctgatttttggcaaacaaaatgctgccagagacaatgcggattacagcgatgtcatgctcaccagcgaggaagaaatcaaaaccactaaccctgtggctacagaggaatacggtatcgtggcagataacttgcagcagcaaaacacggctcctcaaattggaactgtcaacagccagggggccttacccggtatggtctggcagaaccgggacgtgtacctgcagggtcccatctgggccaagattcctcacacggacggcaacttccacccgtctccgctgatgggcggctttggcctgaaacatcctccgcctcagatcctgatcaagaacacgcctgtacctgcggatcctccgaccaccttcaaccagtcaaagctgaactctttcatcacgcaatacagcaccggacaggtcagcgtggaaattgaatgggagctgcagaaggaaaacagcaagcgctggaaccccgagatccagtacacctccaactactacaaatctacaagtgtggactttgctgttaatacagaaggcgtgtactctgatccccaccccattggcacccgttacctcacccgtcccctgtaa

SEQ ID NO: 1089 - DNA, 2214 bp, Artificial Sequence
  Description of Artificial Sequence: Synthetic polynucleotide
atggctgccgatggttatcttccagattggctcgaggacaacctctctgagggcattcgcgagtggtgggcgctgaaacctggagccccgaagcccaaagccaaccagcaaaagcaggacgacggccggggtctggtgcttcctggctacaagtacctcggacccttcaacggactcgacaaaggagagccggtcaacgaggcggacgcggcagccctcgaacacgacaaggcctacgaccagcagctcaaagcgggtgacaatccgtacctgcggtataaccacgccgacgccgagtttcaggagcgtctgcaagaagatacgtcttttgggggcaacctcgggcgagcagtcttccaggccaagaagcgggttctcgaacctctcggtctggttgaggaaggcgctaagacggctcctggaaagaagagaccggtagagccatcaccccagcgttctccagactcctctacgggcatcggcaagaaaggccagcagcccgccagaaaaagactcaattttggtcagactggcgactcagagtcagttccagaccctcaacctctcggagaacctccagcagcgccctctggtgtgggacctaatacaatggcttcaggcggtggcgcaccaatggcagacaataacgagggcgccgacggagtgggtaattcctcgggaaattggcattgcgattccacatggatgggcgacagagtcatcaccaccagcacccgaacctgggccctgcccacctacaacaaccacctctacaagcaaatctccagtgcttcaacgggggccagcaacgacaaccactacttcggctacagcaccccctgggggtattttgactttaacagattccactgccacttttcaccacgtgactggcagcgactcatcaacaacaactggggattccggcccaagagactcaacttcaagctcttcaacatccaagtcaaggaggtcacgcagaatgaaggcaccaagaccatcgccaataacctcaccagcaccatccaggtgtttacggactcggagtaccagctgccgtacgttctcggctctgcccaccagggctgcctgcctccgttcccggcggacgtgttcatgattccccagtacggctacctaacactcaacaacggtagtcaggccgtgggacgctcctccttctactgcctggaatactttccttcgcagatgctgagaaccggcaacaacttccagtttacttacaccttcgaggacgtgcctttccacagcagctacgcgcacagccagagcttggaccggctgatgaatcctctgattgaccagtacctgtactacttgtctcggactcaaacaacaggaggcacggcaaatacgcagactctgggcttcagccaaggtgggcctaatacaatggccaatcaggcaaagaactggctgccaggaccctgttaccgccaacaacgcgtctcaacgacaaccgggcaaaacaacaatagcaactttgcctggactgctgggaccaaataccatctgaatggaagaaattcattggctaatcctggcatcgctatggcaacacacaaagacgacaaggagcgtttttttcccagtaacgggatcctgatttttggcaaacaaaatgctgccagagacaatgcggattacagcgatgtcatgctcaccagcgaggaagaaatcaaaaccactaaccctgtggctacagaggaatacggtatcgtggcagataacttgcagcagcaaaacacggctcctcaaattggaactgtcaacagccagggggccttacccggtatggtctggcagaaccgggacgtgtacctgcagggtcccatctgggccaagattcctcacacggacggcaacttccacccgtctccgctgatgggcggctttggcctgaaacatcctccgcctcagatcctgatcaagaacacgcctgtacctgcggatcctccgaccaccttcaaccagtcaaagctgaactctttcatcacacaatacagcaccggacaggtcagcgtggaaattgaatgggagctgcagaaggaaaacagcaagcgctggaaccccgagatccagtacacctccaactactacaaatctacaagtgtggactttgctgttaatacagaaggcgtgtactctgaaccccaccccattggcacccgttacctcacccgtcccctgtaa

SEQ ID NO: 1090 - DNA, 2211 bp, Artificial Sequence
  Description of Artificial Sequence: Synthetic polynucleotide
  modified_base (676)..(676): a, c, g, or t
atggctgccgatggttatcttccagattggctcgaggacactctctctgaaggaataagacagtggtggaagctcaaacctggcccaccaccaccaaagcccgcagagcggcataaggacgacagcaggggtcttgtgcttcctgggtacaagtacctcggacccttcaacggactcgacaagggagagccggtcaacgaggcagacgccgcggccctcgagcacgacaaagcctacgaccggcagctcgacagcggagacaacccgtacctcaagtacaaccacgccgacgcggagtttcaggagcgccttaaagaagatacgtcttttgggggcaacctcggacgagcagtcttccaggcgaaaaagagggttcttgaacctctgggcctggttgaggaacctgttaagacggctccgggaaaaaagaggccggtagagcagtcgccacaagagccagactcctcctcgggcatcggcaagaaaggccagcagcccgctaaaaagagactcaattttggtcagactggcgactcagagtcagtccccgacccacaacctctcggagaacctccagcaacccccgctgctgtgggacctactacaatggcttcaggcggtggcgcaccaatggcggacaataacgaaggcgccgatggagtgggtaatgcctcangaaattggcattgcgattccacatggctgggcgacagagtcatcaccaccagcacccgaacatgggccttgccacctataacaaccacctctacaagcaaatctccagtgcttcaacgggggcgcagcaacgacaaccactacttcggctacagcaccccctgggggtattttgacttcaacagattccactgccacttctcaccacgtgactggcagcgactcatcaacaacaactggggattccggcctaagcgactcaacttcaagctcttcaacattcaggtcaaagaggttacggacaacaatggagtcaagaccatcgccaataaccttaccagcacggtccaggtcttcacggactcagactatcagctcccgtacgttctcggctctgcccaccagggctgcctgcctccgttcccggcggacgtgttcatgattccccagtacggctacctaacactcaacaacggtagtcaggccgtgggacgctcctccttctactgcctggaatactttccttcgcagatgctgagaaccggcaacaacttccagtttacttacaccttcgaggacgtgcctttccacagcagctacgcccacagccagagcttggaccggctgatgaatcctctgattgaccagtacctgtactacttgtctcggactcaaacaacaggaggcacggcaaatacgcagactctgggcttcagccaaggtgggcctaatacaatggccaatcaggcaaagaactggctgccaggaccctgttaccgccaacaacgcgtctcaacgacaaccgggcaaaacaacaatagcaactttgcctggactgctgggaccaaataccatctgaatggaagaaattcattggctaatcctggcatcgctatggcaacacacaaagacgacaaggagcgtttttttcccagtaacgggatcctgatttttggcaaacaaaatgctgccagagacaatgcggattacagcgatgtcatgctcaccagcgaggaagaaatcaaaaccactaaccctgtggctacagaggaatacggtatcgtggcagataacttgcagcagcaaaacacggctcctcaaattggaactgtcaacagccagggggccttacccggtatggtttggcagaaccgggacgtgtacctgcagggtcccatctgggccaagattcctcacacggacggcaacttccacccgtctccgctgatgggcggctttggcctgaaacatcctccgcctcagatcctgatcaagaacacgcctgtacctgcggatcctccgaccaccttcaaccagtcaaagctgaactctttcatcacacagtactccacgggacaggtcagcgtggaaattgaatgggagctgcagaaggaaaacagcaagcgctggaacccggagatccagtacacttccaactactacaaatctacaaatgtggactttgctgttaacacagaaggcgtgtactctgaaccccaccccattggcacccgttacctcacccgtcccctgtaa

SEQ ID NO: 1091 - DNA, 2211 bp, Artificial Sequence
  Description of Artificial Sequence: Synthetic polynucleotide
  modified_base (715)..(715): a, c, g, or t
atggctgccgatggttatcttccagattggctcgaggacaacctctctgagggcattcgcgagtggtgggacttgaaacctggagccccgaaacccaaagccaaccagcaaaagcaggacgacggccggggtctggtgcttcctggctacaagtacctcggacccttcaacggactcgacaagggggagcccgtcaacgcggcggatgcagcggccctcgagcacgacaaggcctacgaccagcagctccaagcgggtgacaatccgtacctgcggtataaccacgccgacgccgagtttcaggagcgtcttcaaggagatacgtcttttgggggcaacctcggacgagcagtcttccaggccaagaagcgggttctcgaacctctcggtctggttgaggaagcggctaagacggctcctggaaagaagaggcctgtagagcagtctcctcaggaaccggactcctccgcgggtattggcaaatcgggtgcacagcccgctaaaaagagactcaatttcggtcagactggcgacacagagtcagtcccagaccctcaaccaatcggagaacctcccgcagccccctctggtgtgggacctaatacaatggctgcaggcggtggcgcaccaatggcagacaataacgaaggcgccgatggagtgggtagttcctcgggaaattggcattgcgattccacatggctgggcgacagantcatcaccaccagcacccgaacctgggccctgcccacctataacaaccatctctacaagcaaatctccagtgcttcaacgggggccagcaacgacaaccactacttcggctacagcaccccctgggggtattttgacttcaacagattccactgccacttctcaccacgtgactggcagcgactcatcaacaacaactggggattccggcctaagcgactcaacttcaagctcttcaacattcaggtcaaagaggttacggacaacaatggagtcaagaccatcgccaataaccttaccagcacggtccaggtcttcacggactcggagtaccagttgccgtacgtcctcggctctgcgcaccagggctgcctgcctccgttcccggcggacgtgttcatgattccgcagtacggctacctaacgctcaacaatggcagccaggcagtgggacggtcatccttttactgcctggaatatttcccatcgcagatgctgagaacgggcaacaactttaccttcagctacacttttgaggacgttcctttccacagcagctacgctcacagccagagtctggaccgtctcatgaatcctctgattgaccagtacctgtactacttgtctcggactcaaacaacaggaggcacggcaaatacgcagactctgggcttcagccaaggtgggcctaatacaatggccaatcaggcaaagaactggctgccaggaccctgttaccgccaacaacgcgtctcaacgacaaccggacaaaacaacaatagcaactttgcctggactgctgggaccaaataccatctgaatggaagaaattcattggctaatcctggcatcgctatggcaacacacaaagacgacaaggagcgtttttttcccagtaacgggatcctgatttttggcaaacaaaatgctgccagagacaatgcggattacagcgatgtcatgctcaccagcgaggaagaaatcaaaaccactaaccctgtggctacagaggaatacggtatcgtggcagataactttcagcagcaaaacacggctcctcaaattggaactgtcaacagccagggggccttacccggtatggtctggcagaaccgggacgtgtacctgcagggtcccatctgggccaagattcctcacacggacggcaacttccacccgtctccgctgatgggcggctttggcctgaaacatcctccgcctcagatcctgatcaagaacacgcctgtacctgcggatcctccgaccaccttcaaccagtcaaagctgaactctttcatcacgcaatacagcaccggacaggtcagcgtggaaattgaatgggagctgcagaaggaaaacagcaagcgctggaaccccgagatccagtacacctccaactactacaaatctacaagtgtggactttgctgttaatacagaaggcgtgtactctgaaccccaccccattggcacccgttacctcacccgtcccctgtaa

SEQ ID NO: 1092 - DNA, 2211 bp, Artificial Sequence
  Description of Artificial Sequence: Synthetic polynucleotide
atggctgccgatggttatcttccagattggctcgaggacaacctctctgagggcattcgcgagtggtgggcgctgaaacctggagccccgaagcccaaagccaaccagcaaaagcaggacgacggccggggtctggtgcttcctggctacaagtacctcggacccttcaacggactcgacaaaggagagccggtcaacgaggcggacgcggcagccctcgaacacgacaaagcttacgaccagcagctcaaggccggtgacaacccctacctcaagtataaccacgccgacgccgagtttcaggagcgtctgcaagaagatacgtcttttgggggcaacctcgggcgagcagtcttccaggccaaaaagaggcttcttgaacctcttggtctggttgaggaagcggctaagacggctcctggaaagaagaggcctgtagagcagtctcctcaggaaccggactcctccgcgggtattggcaaatcgggtgcacagcccgctaaaaagagactcaatttcggtcagactggcgacacagagtcagtcccagacccacaacctctcggagaacctccagcaacccccgctgctgtgggacctactacaatggcttcaggcggtggcgcaccaatggcggacaataacgaaggcgccgatggagtgggtaatgcctcaggaaattggcattgcgattccacatggctgggcgacagagtcatcaccaccagcacccgaacatgggccttgcccacctataacaaccacctctacaagcaaatctccagtgcttcaacgggggccagcaacgacaaccactacttcggctacagcaccccctgggggtattttgacttcaacagattccactgccacttctcaccacgtgactggcagcgactcatcaacaacaactggggattccggcccaagagactcagcttcaagctcttcaacatccaggtcaaggaggtcacgcagaatgaaggcaccaagaccatcgccaataacctcaccagcaccatccaggtgtttacggactcggagtaccagctgccgtacgttctcggctccgcccaccagggctgcctgcctccgttcccggcggacgtgttcatgattccccagtacggctacctaacactcaacaacggtagtcaggccgtgggacgctcctccttctactgcctggaatactttccttcgcagatgctgagaaccggcaacaacttccagtttacttacaccttcgaggacgtgcctttccacagcagctacgcccacagccagagcttggaccggctgatgaatcctctgattgaccagtacctgtactacttgtctcggactcaaacaacaggaggcacggcaaatacgcagactctgggcttcagccaaggtgggcctaatacaatggccaatcaggcaaagaactggctgccaggaccctgttaccgccaacaacgcgtctcaacgacaaccgggcaaaacaacaatagcaactttgcctggactgctgggaccaaataccatctgaatggaagaaattcattggctaatcctggcatcgctatggcaacacacaaagacgacaaggagcgtttttttcccagtaacgggatcctgatttttggcaaacaaaatgctgccagagacaatgcggattacagcgatgtcatgctcaccagcgaggaagaaatcaaaaccactaaccctgtggctacagaggaatacggtatcgtggcagataacttgcagcagcaaaacacggctcctcaaattggaactgtcaacagccagggggccttacccggtatggtctggcagaaccgggacgtgtacctgcagggtcccatctgggccaagattcctcacacggacggcaacttccacccgtctccgctgatgggcggctttggcctgaaacatcctccgcctcagatcctgatcaagaacacgcctgtacctgcggatcctccgaccaccttcaaccagtcaaagctgaactctttcatcacgcaatacagcaccggacaggtcagcgtggaaattgaatgggagctgcagaaggaaaacagcaagcgctggaaccccgagatccagtacacctccaactactacaaatctacaagtgtggactttgctgttaatacagaaggcgtgtactctgaaccccaccccattggcacccgttacctcacccgtcccctgtaa

SEQ ID NO: 1093 - DNA, 2211 bp, Artificial Sequence
  Description of Artificial Sequence: Synthetic polynucleotide
atggctgccgatggttatcttccagattggctcgaggacactctctctgaaggaataagacagtggtggaagctcaaacctggcccaccaccaccaaagcccgcagagcggcataaggacgacagcaggggtcttgtgcttcctgggtacaagtacctcggacccttcaacggactcgacaagggagagccggtcaacgaggcagacgccgcggccctcgagcacgacaaagcctacgaccagcagctccaagcgggtgacaatccgtacctgcggtataaccacgccgacgccgagtttcaggagcgtcttcaaggagatacgtcttttgggggcaacctcggacgagcagtcttccaggccaaaaagaggcttcttgaacctcttggtctggttgaggaagcggctaagacggctcctggaaagaagaggcctgtagagcagtctcctcaggaaccggactcctccgcgggtattggcaaatcgggtgcacagcccgctaaaaagagactcaatttcggtcagactggcgacacagagtcagtcccagaccctcaaccaatcggagaacctcccgcagccccctcaggtgtgggatctcttacaatggcttcaggtggtggcgcaccagtggcagacaataacgaaggtgccgatggagtgggtagttcctcgggaaattggcattgcgattcccaatggctgggggacagagtcatcaccaccagcacccgaacatgggccttgcccacctataacaaccacctctacaagcaaatctccagtgcttcaacgggggccagcaacgacaaccactacttcggctacagcaccccctgggggtattttgacttcaaccgcttccactgccacttctcaccacgtgactggcagcgactcatcaacaacaactggggattccggcccaagagactcagcttcaagctcttcaacatccaggtcaaggaggtcacgcagaatgaaggcaccaagaccatcgccaataacctcaccagcaccatccaggtgtttacggactcggagtaccagctgccgtacgttctcggctctgcccaccagggctgcctgcctccgttcccggcggacgtgttcatgattccccagtacggctacctaacactcaacaacggtagtcaggccgtgggacgctcctccttctactgcctggaatactttccttcgcagatgctgagaaccggcaacaacttccagtttacttacaccttcgaggacgtgcctttccacagcagctacgcccacagccagagcttggaccggctgatgaatcctctgattgaccagtacctgtactacttgtctcggactcaaacaacaggaggcacggcaaatacgcagactctgggcttcagccaaggtgggcctaatacaatggccaatcaggcaaagaactggctgccaggaccctgttaccgccaacaacgcgtctcaacgacaaccgggcaaaacaacaatagcaactttgcctggactgctgggaccaaataccatctgaatggaagaaattcattggctaatcctggcatcgctatggcaacacacaaagacgacaaggagcgtttttttcccagtaacgggatcctgatttttggcaaacaaaatgctgccagagacaatgcggattacagcgatgtcatgctcaccagcgaggaagaaatcaaaaccactaaccctgtggctacagaggaatacggtatcgtggcagataacttgcagcagcaaaacacggctcctcaaattggaactgtcaacagccagggggccttacccggtatggtctggcagaaccgggacgtgtacctgcagggtcccatctgggccaagattcctcacacggacggcaacttccacccgtctccgctgatgggcggctttggcctgaaacatcctccgcctcagatcctgatcaagaacacgcctgtacctgcggatcctccgaccaccttcaaccagtcaaagctgaactctttcatcacgcaatacagcaccggacaggtcagcgtggaaattgaatgggagctgcagaaggaaaacagcaagcgctggaaccccgagatccagtacacctccaactactacaaatctacaagtgtggactttgctgttaatacagaaggcgtgtactctgaaccccaccccattggcacccgttacctcacccgtcccctgtaa

SEQ ID NO: 1094 - DNA, 2217 bp, Artificial Sequence
  Description of Artificial Sequence: Synthetic polynucleotide
atggctgccgatggttatcttccagattggctcgaggacaacctctctgagggaataagacagtggtggaagctcaaacctggcccaccaccaccaaagcccgcagagcggcataaggacgacagcaggggtcttgtgcttcctgggtacaagtacctcggacccttcaacggactcgacaagggagagccggtcaacgcggcggacgcagcggccctcgagcacgacaaggcctacgaccagcagctcaaagcgggtgacaatccgtacctgcggtataaccacgccgacgccgagtttcaggagcgtctgcaagaagatacgtcttttgggggcaacctcgggcgagcagtcttccaggccaagaagcgggttctcgaacctctcggtctggttgaggaaggcgctaagacggctcctggaaagaagagaccggtagagccatcaccccagcgttctccagactcctctacgggcatcggcaagaaaggccagcagcccgctaaaaagagactcaattttggtcagactggcgactcagagtcagtccccgacccacaacctctcggagaacctccagcaacccccgctgctgtgggacctactacaatggcttcaggcggtggcgcaccaatggcagacaataacgaaggcgccgacggagtgggtaatgcctcaggaaattggcattgcgattccacatggctgggggacagagtcatcaccaccagcacccgaacctgggccctgcccacctacaacaaccacctctacaagcaaatctccaacgggacttcgggaggaagcaccaacgacaacacctacttcggctgcgtcacgccctgggggtattttgactttaacaaattccactgccacttttcaccggatgactggcaacgactcatcaacaacggctggggattccggactaagcgactcaacttcaagctcttcagcatgaaagtcaaaaagggtacggacaacactggaatcaagaccatcgcgaataaccttaccaacacggtccatgtcttcgcggactcggagtaccagttgccgtacgtcctcggctctgcgcaccagggctgcctccctccgttcccggcggacgtgttcatgattccgcagtacggctacctaacgctcaacaatggcagccaggcagtgggacggtcatccttttactgcctggaatatttcccatcgcagatgctgagaacgggcaacaactttaccttcagctacacctttgaggacgttcctttccacagcagctacgctcacagccagagtctggaccgtctcatgaatcctctgattgaccagtacctgtactacttgtctcggactcaaacaacaggaggcacggcaaatacgcagactctgggcttcagccaaggtgggcctaatacaatggccaatcaggcaaagaactggctgccaggaccctgttaccgccaacaacgcgtctcaacgacaaccgggcaaaacaacaatagcaactttgcctggactgctgggaccaaataccatctgaatggaagaaattcattggctaatcctggcatcgctatggcaacacacaaagacgacaaggagcgtttttttcccagtaacgggatcctgatttttggcaaacaaaatgctgccagagacaatgcggattacagcgatgtcatgctcaccagcgaggaagaaatcaaaaccactaaccctgtggctacagaggaatacggtatcgtggcagataacttgcagcagcaaaacacggctcctcaaattggaactgtcaacagccagggggccttacccggtatggtctggcagaaccgggacgtgtacctgcagggtcccatctgggccaagattcctcacacggacggcaacttccacccgtctccgctgatgggcggctttggcctgaaacatcctccgcctcagatcctgatcaagaacacgcctgtacctgcggatcctccgaccaccttcaaccagtcaaagctgaactctttcatcacgcaatacagcaccggacaggtcagcgtggagatcgagtgggagctgcagaaggaaaacagcaagcgctggaacccggagatccagtacacctccaactactacaaatctacaagtgtggactttgctgttaatacagaaggcgtgtactctgaaccccaccccattggcacccgttacctcacccgtcccctgtaa

SEQ ID NO: 1095 - DNA, 2214 bp, Artificial Sequence
  Description of Artificial Sequence: Synthetic polynucleotide
atggctgccgatggttatcttccagattggctcgaggacactctctctgaaggaataagacagtggtggaagctcaaacctggcccaccaccaccaaagcccgcagagcggcataaggacgacagcaggggtcttgtgcttcctgggtacaagtacctcggacccttcaacggactcgacaagggggagcccgtcaacgcggcggacgcagcggccctcgagcacgacaaggcctacgaccagcagctcaaagcgggtgacaatccgtacctgcggtataaccacgccgacgccgagtttcaggagcgtctgcaagaagatacgtcttttgggggcaacctcgggcgagcagtcttccaggccaagaagcgggttctcgaacctctcggtctggttgaggaaggcgctaagacggctcctggaaagaagagaccggtagagccatcaccccagcgttctccagactcctctacgggcatcggcaagaaaggccagcagcccgcgaaaaagagactcaactttgggcagactggcgactcagagtcagtgcccgaccctcaaccaatcggagaaccccccgcaggcccctctggtctgggatctggtacaatggctgcaggcggtggcgctccaatggcagacaataacgaaggcgccgatggagtgggtagttcctcgggaaattggcattgcgattccacatggctgggggacagagtcatcaccaccagcacccgaacctgggccctgcccacctacaacaaccacctctacaaacaaatttccagcgcttcaacgggagcctcgaacgacaatcactactttggctacagcaccccctgggggtattttgacttcaacagattccactgccacttctcaccacgtgactggcagcgactcatcaacaacaactggggattccggcctaagcgactcaacttcaagctcttcaacattcaggtcaaagaggttacggacaacaatggagtcaagaccatcgccaataaccttaccagcacggtccaggtcttcacggactcggagtaccagttgccgtacgtcctcggctctgcgcaccagggctgcctccctccgttcccggcggacgtgttcatgattccgcagtacggctacctaacgctcaacaatggcagccaggcagtgggacggtcatccttttactgcctggaatatttcccatcgcagatgctgagaacgggcaacaactttaccttcagctacacctttgaggacgttcctttccacagcagctacgctcacagccagagtctggaccgtctcatgaatcctctgattgaccagtacctgtactacttgtctcggactcaaacaacaggaggcacggcaaatacgcagactctgggcttcagccaaggtgggcctaatacaatggccaatcaggcaaagaactggctgccaggaccctgttaccgccaacaacgcgtctcaacgacaaccgggcaaaacaacaatagcaactttgcctggactgctgggaccaaataccatctgaatggaagaaattcattggctaatcctggcatcgctatggcaacacacaaagacgacaaggagcgtttttttcccagtaacgggatcctgatttttggcaaacaaaatgctgccagagacaatgcggattacagcgatgtcatgctcaccagcgaggaagaaatcaaaaccactaaccctgtggctacagaggaatacggtatcgtggcagataacctgcagcagcaaaacacggctcctcaaattggaactgtcaacagccagggggccttacccggtatggtctggcagaaccgggacgtgtacctgcagggtcccatctgggccaagattcttcacacggacggcaactttcacccttctccgctgatgggagggtttggaatgaagcacccgcctcctccgatcctgatcaagaacacgcctgtacctgcggatcctccgaccaccttcaaccagtcaaagctgaactctttcatcacgcaatacagcaccggacaggtcagcgtggaaattgaatgggagctgccgaaggaaaacagcaagcgctggaaccccgagatccagtacacctccaactactacaaatctacaagtgtggactttgctgttaatacagaaggtgtgtactatgaaccccaccccattggcacccgttacctcacccctcccctgtaa

SEQ ID NO: 1096 - DNA, 2214 bp, Artificial Sequence
  Description of Artificial Sequence: Synthetic polynucleotide
atggctgccgatggttatcttccagattggctcgaggacaacctctctgagggcattcgcgagtggtgggcgctgaaacctggagccccgaagcccaaagccaaccagcaaaagcaggacgacggccggggtctggtgcttcctggctacaagtacctcggacccttcaacggactcgacaagggggagcccgtcaacgcggcggacgcagcggccctcgagcacgacaaggcctacgaccagcagctcaaagcgggtgacaatccgtacctgcggtataaccacgccgacgccgagtttcaggagcgtctgcaagaagatacgtcttttgggggcaacctcgggcgagcagtcttccaggccaagaagcgggttctcgaacctctcggtctggttgaggaaggcgctaagacggctcctggaaagaagagaccggtagagccatcaccccagcgctctccagactcctctacgggcatcggcaagaaaggccaacagcccgccagaaaaagactcaattttggtcagactggcgactcagagtcagttccagaccctcaacctctcggagaacctccagcagcgccctctggtgtggcacctaatacaatggctgcaggcggtggcgcaccaatggcagacaataacgaaggcgccgacggagtgggtaatgcctcaggaaattggcattgcgattccacatggctgggcgacagagtcatcaccaccagcacccgaacatgggccttgcccacctataacaaccacctctacaagcaaatctccagtgcttcaacgggggccagcaacgacaaccactacttcggctacagcaccccctgggggtattttgatttcaacagattccactgccacttttcaccacgtgactggcagcgactcatcacaacaattgggggattccggcctaagcgactcaacttcaagctcttcaacattcaggtcaaagaggttacggacaacaatggagtcaagaccatcgccaataaccttaccagcacggtccaggtcttcacggactcggagtaccagttgccgtacgtcctcggctctgcgcaccagggctgcctccctccgttcccggcggacgtgttcatgattccgcagtacggctacctaacgctcaacaatggcagccaggcagtgggacggtcatccttttactgcctggaatatttcccatcgcagatgctgagaacgggcaacaactttaccttcagctacacctttgaggacgttcctttccacagcagctacgctcacagccagagtctggaccggctgatgaatcctctgattgaccagtacctgtactacttgtctcggactcaaacaacaggaggcacggcaaatacgcagactctgggcttcagccaaggtgggcctaatacaatggccaatcaggcaaagaactggctgccaggaccctgttaccgccaacaacgcgtctcaacgacaaccgggcaaaacaacaatagcaactttgcctggactgctgggaccaaataccatctgaatggaagaaattcattggctaatcctggcatcgctatggcaacacacaaagacgacaaggagcgtttttttcccagtaacgggatcctgatttttggcaaacaaaatgctgccagagacaatgcggattacagcgatgtcatgctcaccagcgaggaagaaatcaaaaccactaaccctgtggctacagaggaatacggtatcgtggcagataacttgcagcagcaaaacacggctcctcaaattggaactgtcaacagccagggggccttacccggtatggtctggcagaaccgggacgtgtacctgcagggtcccatctgggccaagattcctcacacggacggcaacttccacccgtctccgctgatgggcggctttggcctgaaacatcctccgcctcagatcctgatcaagaacacgcctgtacctgcggatcctccgaccaccttcaaccagtcaaagctgaactctttcatcacgcaatacagcaccggacaggtcagcgtggaaattgaatgggagctgcagaaggaaaacagcaagcgctggaaccccgagatccagtacacctccaactactacaaatctacaagtgtggactttgctgttaatacagaaggcgtgtactctgaaccccaccccattggcacccgttacctcacccgtcccctgtaa

SEQ ID NO: 1097 - DNA, 2211 bp, Artificial Sequence
  Description of Artificial Sequence: Synthetic polynucleotide
atggctgccgatggttatcttccagattggctcgaggacactctctctgaaggaataagacagtggtggaagctcaaacctggcccaccaccaccaaagcccgcagagcggcataaggacgacggccggggtctggtgcttcctggctacaagtacctcggacccttcaacggactcgacaagggggagcccgtcaacgcggcggacgcagcggccctcgagcacgacaaggcctacgaccagcagctcaaagcgggtgacaatccgtacctgcggtataaccacgccgacgccgagtttcaggagcgtctgcaagaagatacgtcttttgggggcaacctcggacgagcagtcttccaggcgaaaaagagggttcttgaacctctgggcctggttgaggaacctgttaagacggctccgggaaaaaagaggccggtagagcagtcgccacaagagccagactcctcctcgggcatcggcaagaaaggccagcagcccgctaaaaagagactcaattttggtcagactggcgactcagagtcagtccccgacccacaacctctcggagaacctccagcaacccccgctgctgtgggacctactacaatggcttcaggcggtggcgcaccaatggcagacaataacgaaggcgccgacggagtgggtaatgcctcaggaaattggcattgcgattccacatggatgggcgacagagtcatcaccaccagcacccgaacatgggccttgcccacctataacaaccacctctacaagcaaatctccagtgcttcaacgggggccagcaacgacaaccactacttcggctacagcaccccctgggggtattttgactttaacagattccactgccacttttcaccacgtgactggcagcgactcatcaacaacaactggggattccggcctaagcgactcaacttcaagctcttcaacattcaggtcaaggaggtcacgcagaatgaaggcaccaagaccatcgccaataacctcaccagcaccatccaggtgtttacggactcggagtaccagctgccgtacgttctcggctccgcccaccagggctgcctgcctccgttcccggcggacgtgttcatgatcccccagtacggctacctaacactcaacaacggtagtcaggccgtgggacgctcctccttctactgcctggaatactttccttcgcagatgctgagaaccggcaacaacttccagtttacttacaccttcgaggacgtgcctttccacagcagctacgcgcacagccagagcttggaccggctgatgaatcctctgattgaccagtacctgtactacttgtctcggactcaaacaacaggaggcacggcaaatacgcagactctgggcttcagccaaggtgggcctaatacaatggccaatcacgcaaagaactggctgccaggaccctgttaccgccaacaacgcgtctcaacgacaaccgggcaaaacaacaatagcaactttgcctggactgctgggaccaaataccatctgaatggaagaaattcattggctaatcctggcatcgctatggcaacacacaaagacgacaaggagcgtttttttcccagtaacgggatcctgatttttggcaaacaaaatgctgccagagacaatgcggattacagcgatgtcatgctcaccagcgaggaagaaatcaaaaccactaaccctgtggctacagaggaatacggtatcgtggcagataacttgcagcagcaaaacacggctcctcaaattggaactgtcaacagccagggggccttacccggtatggtctggcagaaccgggacgtgtacctgcagggtcccatctgggccaagattcctcacacggacggcaacttccacccgtctccgctgatgggcggcttcggcctgaaacatcctccgcctcagatcctgatcaagaacacgcctgtacctgcggatcctccgaccaccttcaaccagtcaaagctgaactctttcatcacgcaatacagcaccggacaggtcagcgtggaaattgaatgggagctgcagaaggaaaacagcaagcgctggaaccccgagatccagtacacctccaactactacaaatctacaagtgtggactttgctgttaatacagaaggcgtgtactctgaaccccaccccattggcacccgttacctcacccgtcccctgtaa

SEQ ID NO: 1098 - DNA, 2214 bp, Artificial Sequence
  Description of Artificial Sequence: Synthetic polynucleotide
atggctgccgatggttatcttccagattggctcgaggacaacctctctcagggcattcgcgagtggtgggacttgaaacctggagccccgaaacccaaagccaaccagcaaaagcaggacgacggccggggtctggtgcttcctggctacaagtacctcggacccttcaacggactcgacaagggggagcccgtcaacgcggcggacgcagcggccctcgagcacgacaaggcctacgaccagcagctcaaagcgggtgacaatccgtacctgcggtataaccacgccgacgccgagtttcaggagcgtctgcaagaagatacgtcttttgggggcaacctcggacgagcagtcttccaggccaagaagcgggttctcgaacctctcggtctggttgaggaaggcgctaagacggctcctggaaagaagagaccggtagagccatcaccccagcgttctccagactcctctacgggcatcggcaagaaaggccaacagcccgccagaaaaagactcaattttggtcagactggcgactcagagtcagttccagaccctcaacctctcggagaacctccagcagcgcccgctgctgtgggacctactacaatggcttcaggcggtggcgcaccaatggcagacaataacgaaggcgccgacggagtgggtagttcctcgggaaattggcattgcgattcccaatggctgggggacagagtcatcaccaccagcacccgaacctgggccctgcccacctacaacaaccacctctacaagcaaatctccagtgcttcaacgggggccagcaacgacaaccactacttcggctacagcaccccctgggggtattttgacttcaacagattccactgccacttttcaccacgtgactggcaaagactcatcaacaacaactggggattccggcccaagagactcagcttcaagctcttcaacatccaggtcaaggaggtcacgcagaatgaaggcaccaagaccatcgccaataacctcaccagcaccatccaggtgtttacggactcggagtaccagctgccgtacgttctcggctctgcccaccagggctgcctgcctccgttcccggcggacgtgttcatgattccccagtacgggtacctgactctgaacaatggcagtcaggccgtgggccgttcctccttctactgcctggagtactttccttctcaaatgctgagaaccggcaacaacttccagtttacttacaccttcgaggacgtgcctttccacagcagctacgcccacagccagagcttggaccggctgatgaatcctctgattgaccagtacctgtactacttgtctcggactcaaacaacaggaggcacgacaaatgcgcagactctgggcttcagccaaggtgggcctaatacaatggccaatcaggcaaagaactggctgccaggaccctgttaccgccaacaacgcgtctcaacgacaaccgggcaaaacaacaatagcaactttgcctggactgctgggaccaaataccatctgaatggaagaaattcattggctaatcctggcatcgctatggcaacacacaaagacgacaaggagcgtttttttcccagtaacgggatcctgatttttggcaaacaaaatgctgccagagacaatgcggattacagcgatgtcatgctcaccagcgaggaagaaatcaaaaccactaaccctgtggctacagaggaatacggtatcgtggcagataacttgcagcagcaaaacacggctcctcaaattggaactgtcaacagccagggggccttacccggtatggtctggcagaaccgggacgtgtacctgcagggtcccatctgggccaagattcctcacacggacggcaacttccacccgtctccgctgatgggcggctttggcctgaaacatcctccgcctcagatcctgatcaagaacacgcctgtacctgcggatcctccgaccaccttcaaccagtcaaagctgaactctttcatcacacagtactccacgggacaggtcagcgtggaaattgaatgggagctgcagaaggaaaacagcaagcgctggaacccggagatccagtacacttccaactactacaaatctacaaatgtggactttgctgttaacacagaaggcgtgtactctgaaccccaccccattggcacccgttacctcacccgtcccctgtaa

SEQ ID NO: 1099 - DNA, 2211 bp, Artificial Sequence
  Description of Artificial Sequence: Synthetic polynucleotide
atggctgccgatggttatcttccagattggctcgaggacaacctctctgagggcattcgcgagtggtgggacttgaaacctggagccccgaaacccaaagccaaccagcaaaagcaggacgacggccggggtctggtgcttcctggctacaagtacctcggacccttcaacggactcgacaagggggagcccgtcaacgcggcggacgcagcggccctcgagcacgacaaggcctacgaccagcagctcaaagcgggtgacaatccgtacctgcggtataaccacgccgacgccgagtttcaggagcgtctgcaagaagatacgtcttttgggggcaacctcgggcgagcagtcttccaggccaagaagagggttctcgaaccttttggtctggttgaggaaggcgctaagacggctcctggaaagaaacgtccggtagagcagtcgccacaagagccagactcctcctcgggcatcggcaagacaggccagcagcccgctaaaaagagactcaatttcggtcagactggcgacacagagtcagtcccagaccctcaaccaatcggagaacctcccgcagccccctcaggtgtgggacctaatacaatggctgcaggcggtggcgcaccaatggcagacaataacgaaggcgccgacggagtgggtagttcctcgggaaattggcattgcgattccacatggatgggtgacagagtcatcaccaccagcacccgaacctgggccctgcccacctacaataaccacctctacaagcaaatctccagtgcttcaacgggggccagcaacgacaaccactacttcggctacagcaccccctgggggtattttgacttcaacagattccactgccacttctcaccacgtgactggcagcgactcatcaacaacaactggggattccggcctaagcgactcaacttcaagctcttcaacattcaggtcaaggaggtcacgcagaatgaaggcaccaagaccatcgccaataacctcaccagcaccatccaggtgtttacggactcggagtaccagctgccgtacgttctcggctctgcccaccagggctgcctgcctccgttcccggcggacgtgttcatgattccccagtacggctacctaacactcaacaacggtagtcaggccgtgggacgctcctccttctactgcctggaatactttccttcgcagatgctgagaaccggcaacaacttccagtttacttacaccttcgaggacgtgcctttccacagcagctacgcccacagccagagcttggaccggctgatgaatcctctgattgaccagtacctgtactacttgtctcggactcaaacaacaggaggcacggcaaatacgcagactctgggcttcagccaaggtgggcctaatacaatggccaatcaggcaaagaactggctgccaggaccctgttaccgccaacaacgcgtctcaacgacaaccgggcaaaacaacaatagcaactttgcctggactgctgggaccaaataccatctgaatggaagaaattcattggctaatcctggcatcgctatggcaacacacaaagacgacaaggagcgtttttttcccagtaacgggatcctgatttttggcaaacaaaatgctgccagagacaatgcggattacagcgatgtcatgctcaccagcgaggaagaaatcaaaaccactaaccctgtggctacagaggaatacggtatcgtggcagataacttgcagcagcaaaacacggctcctcaaattggaactgtcaacagccagggggccttacccggtatggtctggcagaaccgggacgtgtacctgcagggtcccatctgggccaagattcctcacacggacggcaacttccacccgtctccgctgatgggcggctttggcctgaaacatcctccgcctcagatcctgatcaagaacacgcctgtacctgcggatcctccgaccaccttcaaccagtcaaagctgaactctttcatcacacagtactccacgggacaggtcagcgtggaaattgaatgggagctgcagaaggaaaacagcaagcgctggaacccggagatccagtacacttccaactactacaaatctacaaatgtggactttgctgttaacacagaaggcgtgtactctgaaccccaccccattggcacccgttacttcacccgtcccctgtaa

SEQ ID NO: 1100 - DNA, 2211 bp, Artificial Sequence
  Description of Artificial Sequence: Synthetic polynucleotide
atggctgccgatggttatcttccagattggctcgaggacaacctctctgagggcattcgcgagtggtgggacttgaaacctggagccccgaaacccaaagccaaccagcaaaagcaggacgacggccggggtctggtgcttcctggctacaagtacctcggacccttcaacggactcgacaagggggagcccgtcaacgcggcggacgcagcggccctcgagcacgacaaggcctacgaccagcagctcaaagcgggtgacaatccgtacctgcggtataaccacgccgacgccgagtttcaggagcgtctgcaagaagatacgtcttttgggggcaacctcgggcgagcagtcttccaggccaagaagcgggttctcgaacctctcggtctggttgaggaaggcgctaagacggctcctggaaagaaacgtccggtagagcagtcgccacaagagccagactcctcctcgggcatcggcaagacaggccagcagcccgctaaaaaaagactcaattttggtcagactggcgactcagagtcagttccagaccctcaacctctcggagaacctccagcaacccccgctgctgtgggacctactacaatggcttcaggtggtggcgcaccaatggcagacaataacgagggcgccgacggagtgggtaattcctcgggaaattggcattgcgattccacatggatgggcgacagagtcatcaccaccagcacccgaacctgggccctgcccacctacaacaatcacctctacaagcaaatctccagtgcttcaacgggggccagcaacgacaaccactacttcggctacagcaccccctgggggtattttgacttcaacagattccactgccacttctcaccacgtgactggcagcgactcatcaacaacaactggggattccggcctaagcgactcaacttcaagctcttcaacattcaggtcaaagaggttacggacaacaatggagtcaagaccatcgccaataaccttaccagcacggtccaggtcttcacggactcggagtaccagttgccgtacgtcctcggctctgcgcaccagggctgcctccctccgttcccggcggacgtgttcatgattccgcagtacggctacctaacgctcaacaacggtagtcaggccgtgggacgctcctccttctactgcctggaatactttccttcgcagatgctgagaaccggcaacaacttccagtttacttacaccttcgaggacgtgcctttccacagcagctacgcccacagccagagcttggaccggctgatgaatcctctgattgaccagtacctgtactacttgtctcggactcaaacaacaggaggcacggcaaatacgcagactctgggcttcagccaaggtgggcctaatacaatggccaatcaggcaaagaactggctgccaggaccctgttaccgccaacaacgcgtctcgacgacaaccgggcaaaacaacaatagcaactttgcctggactgctgggaccaaataccatctgaatggaagaaattcattggctaatcctggcatcgctatggcaacacacaaagacgacaaggagcgtttttttcccagtaacgggatcctgatttttggcaaacaaaatgctgccagagacaatgcggattacagcgatgtcatgctcaccagcgaggaagaaatcaaaaccactaaccctgtggctacagaggaatacggtatcgtggcagataacttgcagcagcaaaacacggctcctcaaattggaactgtcaacagccagggggccttacccggtatggtttggcagaaccgggacgtgtacctgcagggtcccatctgggccaagattcctcacacggacggcaacttccacccgtctccgctgatgggcggctttggcctgaaacatcctccgcctcagatcctgatcaagaacacgcctgtacctgcggatcctccgaccaccttcaaccagtcaaagctgaactctttcatcacacagtactccacgggacaggtcagcgtggaaattgaatgggagctgcagaaggaaaacagcaagcgctggaacccggagatccagtacacttccaactactacaaatctacaaatgtggactttgctgttaacacagaaggcgtgtactctgaaccccaccccattggcacccgttacctcacccgtcccctgtaa

SEQ ID NO: 1101 - DNA, 2211 bp, Artificial Sequence
  Description of Artificial Sequence: Synthetic polynucleotide
atggctgccgatggttatcttccagattggctcgaggacaacctctctgagggcattcgcgagtggtgggacttgaaacctggagccccgaagcccaaagccaaccagcaaaagcaggacgacggccggggtctggtgcttcctggctacaagtacctcggacccttcaacggactcgacaagggggagcccgtcaacgcggcggacgcagcggccctcgagcacgacaaggcctacgaccagcagctcaaagcgggtgacaatccgtacctgcggtataaccacgccgacgccgagtttcaggagcgtctgcaagaagatacgtcttttgggggcaacctcgggcgagcagtcttccaggccaagaagcgggttctcgaacctctcggtctggttgaggaaggcgctaagacggctcctggaaagaaacgtccggtagagcagtcaccacaagagccagactcctcctcgggcatcggcaagacaggccagcagcccgctaaaaagagactcaattttggtcagactggcgactcagagtcagtccccgacccacaacctctcggagaacctccagcaacccccgctgctgtgggacctactacaatggcttcaggcggtggcgcaccaatggcggacaataacgaaggcgccgatggagtgggtaatgcctcaggaaattggcattgcgattccacatggctgggcgacagagtcatcaccaccagcacccgaacatgggccttgcccacctataacaaccacctctacaagcaaatctccagtgcttcaacgggggccagcaacgacaaccactacttcggctacagcaccccctgggggtattttgactttaacagattccactgccacttctcaccacgtgactggcagcgactcatcaacaacaactggggattccggcccaagagactcaacttcaagctcttcaacatccaggtcaaggaggtcacgcagaatgaaggcaccaagaccatcgccaataacctcaccagcaccatccaggtgtttacggactcggagtaccagctgccgtacgttctcggctctgcccaccagggctgcctgcctccgttcccggcggacgtgttcatgattccccagtacggctacctgactctgaacaatggcagtcaggccgtgggccgttcctccttctactgcctagagtactttccttctcaaatgctgagaacgggcaacaactttgagttcagctaccagtttgaggacgtgccttttcacagcagctacgcgcacagccaaagcctggaccggctgatgaatcctctgattgaccagtacctgtactacttgtctcggactcaaacaacaggaggcacggcaaatacgcagactctgggcttcagccaaggtgggcctaatacaatggccaatcaggcaaagaactggctgccaggaccctgttaccgccaacaacgcgtctcaacgacaaccgggcaaaacaacaatagcaactttgcctggactgctgggaccaaataccatatgaatggaagaaattcattggttaatcctggcatcgctatggcaacacacaaagacgacaaggagcgtttttttcccagtaacgggatcctgatttttggcaaacaaaatgttgccagagacaatgcggattacagcgatgtcatgctcaccagcgaggaagaaatcaaaaccactaaccctgtggctacagaggaatacggtattgtggcagataacttgcagcagcaaaacacggctcctcaaattggaactgtcaacagccagggggccttacccggtatggtctggcagaaccgggacgtgtacctgcagggtcccatctgggccaagattcctcacacggacggcaacttccacccgtcgccgctgatgggcggctttggcctgaaacatcctccgcctcagatcctgatcaagaacacgcctgtacctgcggatcctccgaccaccttcaaccagtcaaagctgaactctttcatcacgcaatacagcaccggacaggtcagcgtggaaattgaatgggagctgcagaaggaaaacagcaagcgctggaaccccgagatccagtacacctccaactactacaaatctacaagtgtggactttgctgttaatacagaaggcgtgtactctgaaccccaccccattggcacccgttacctcacccgtcccctgtaa

SEQ ID NO: 1102 - protein, 736 aa, Artificial Sequence
  Description of Artificial Sequence: Synthetic polypeptide
MAADGYLPDWLEDTLSEGIRQWWKLKPGPPPPKPAERHKDDSRGLVLPGYKYLGPFNGLDKGEPVNEADAAALEHDKAYDRQLDSGDNPYLKYNHADAEFQERLKEDTSFGGNLGRAVFQAKKRVLEPLGLVEEPVKTAPGKKRPVEQSPQEPDSSSGIGKKGQQPAKKRLNFGQTGDSESVPDPQPLGEPPATPAAVGPTTMASGGGAPMADNNEGADGVGNASGNWHCDSTWMGDRVITTSTRTWALPTYNNHLYKQISSASTGASNDNHYFGYSTPWGYFDFNRFHCHFSPRDWQRLINNNWGFRPKRLNFRLFNIQVKEVTDNNGVKTIANNLTSTVQVFTDSEYQLPYVLGSAHQGCLPPFPADVFMIPQYGYLTLNNGSQAVGRSSFYCLEYFPSQMLRTGNNFTFSYTFEEVPFHSSYAHSQSLDRLMNPLIDQYLYYLSRTQTTGGTANTQTLGFSQGGPNTMANQAKNWLPGPCYRQQRVSTTTGQNNNSNFAWTAGTKYHLNGRNSLANPGIAMATHKDDKERFFPSNGILIFGKQNAARDNADYSDVMLTSEEEIKTTNPVATEEYGIVADNLQQQNTAPQIGTVNSQGALPGMVWQNRDVYLQGPIWAKIPHTDGNFHPSPLMGGFGLKHPPPQILIKNTPVPADPPTTFNQSKLNSFITQYSTGQVSVEIEWELQKENSKRWNPEIQYTSNYYKSTSVDFAVNTEGVYSEPHPIGTRYLTRPL

SEQ ID NO: 1103 - protein, 736 aa, Artificial Sequence
  Description of Artificial Sequence: Synthetic polypeptide
MAADGYLPDWLEDNLSEGIREWWDLKPASPKPKANQQKQDDGRGLVLPGYKYLGPFNGLDKGEPVNAADAAALEHDKAYDQQLKAGDNPYLRYNHADAEFQERLQEDTSFGGNLGRAVFQAKKRLLEPLGLVEEAAKTAPGKKRPVEQSPQEPDSSAGIGKSGAQPAKKRLNFGQTGGTESVPDPQPLGEPPAAPSGVGPNTMAAGGGAPMADNNEGADGVGSSSGNWHCDSTWLGDRVITTSTRTWALPTYNNHLYKQISSASTGASNDNHYFGYSTPWGYFDFNRFHCHFSPRDWQRLINNNWGFRPKRLSFKLFNIQVKEVTQNEGTKTIANNLTSTIQVFTDSEYQLPYVLGSAHQGCLPPFPADVFMIPQYGYLTLNNGSQAVGRSSFYCLEYFPSQMLRTGNNFQFTYTFEDVPFHSSYAHSQSLDRLMNPLIDQYLYYLSRTQTTGGTANTQTLGFSQGGPNTMANQAKNWLPGPCYRQQRVSTTTGQNNNSNFAWTAGTKYHLNGRNSLANPGIAMATHKDDKERFFPSNGILIFGKQNAARDNADYSDVMLTSEEEIKTTNPVATEEYGIVADNLQQQNTAPQIGTVNSQGALPGMVWQNRDVYLQGPIWAKIPHTDGNFHPSPLMGGFGLKHPPPQILIKNTPVPADPPTTFNQSKLNSFITQYSTGQVSVEIEWELQKENSKRWNPEIQYTSNYYKSTSVDFAVNTEGVYSEPHPIGTRYLTRPL

SEQ ID NO: 1104 - protein, 736 aa, Artificial Sequence; identical to SEQ ID NO: 1043
  Description of Artificial Sequence: Synthetic polypeptide

SEQ ID NO: 1105 - protein, 736 aa, Artificial Sequence
  Description of Artificial Sequence: Synthetic polypeptide
MAADGYLPDWLEDNLSEGIREWWDLEPGAPKPKANQQKQDDGRGLVLPGYKYLGPFNGLDKGEPVNAADAAALEHDKAYDQQLKAGDNPYLRYNHADAEFQERLQEDTSFGGNLGRAVFQAKKRVLEPLGLVEEGAKTAPGKKRPVEQSPQEPDSSSGIGKTGQQPAKKRLNFGQTGDSESVPDPQPLGEPPATPAAVGPTTMASGGGAPMADNNEGADGVGNASGNWHCDSTWLGDRVITTSTRTWALPTYNNHLYKQISSASTGASNDNHYFGYSTPWGYFDFNRFHCHFSPRDWQRLINNNWGFRPKRLNFKLFNIQVKEVTDNNGVKTIANNLTSTVQVFTDSEYQLPYVLGSAHQGCLPPFPADVFMIPQYGYLTLNNGSQAVGRSSFYCLEYFPSQMLRTGNNFQFTYTFEDVPFHSSYAHSQSLDRLMNPLIDQYLYYLSRTQTTGGTANTQTLGFSQGGPNTMANQAKNWLPGPCYRQQRVSTTTGQNNNSNFAWTAGTKYHLNGRNSLANPGIAMATHKDDKERFFPSNGILIFGKQNAARDNADYSDVMLTSEEEIKTTNPVATEEYGIVADNLQQQNTAPQIGTVNSQGALPGMVWQNRDVYLQGPIWAKIPHTDGNFHPSPLMGGFGLKHPPPQILIKNTPVPADPPTTFNQSKLNSFITQYSTGQVSVEIEWELQKENSKRWNPEIQYTSNYYKSTSVDFAVNTEGVYSEPHPIGTRYLTRPL

SEQ ID NO: 1106 - protein, 736 aa, Artificial Sequence; identical to SEQ ID NO: 1043
  Description of Artificial Sequence: Synthetic polypeptide

SEQ ID NO: 1107 - protein, 736 aa, Artificial Sequence
  Description of Artificial Sequence: Synthetic polypeptide
MAADGYLPDWLEDTLSEGIRQWWKLKPGPPPPKPAERHKDDSRGLVLPGYKYLGPFNGLDKGEPVNEADAAALEHDKAYDRQLDSGDNPYLKYNHADAEFQERLKEDTSFGGNLGRAVFQAKKRVLEPLGLVEEPVKTAPGKKRPVEQSPQEPDSSSGIGKKGQQPAKKRLNFGQTGDSESVPDPQPLGEPPATPAAVGPTTMASGGGAPMADNNEGADGVGNASGNWHCDSTWLGDRVITTSTRTWALPTYNNHLYKQISSASTGASNDNHYFGYSTPWGYFDFNRFHCHFSPRDWQRLINNNWGFRPKRLNFKLFNIQVKEVTDNNGVKTIANNLTSTVQVFTDSDYQLPYVLGSAHQGCLPPFPADVFMIPQYGYLTLNNGSQAVGRSSFYCLEYFPSQMLRTGNNFQFTYTFEDVPFHSSYAHSQSLDRLMNPLIDQYLYYLSRTQTTGGTANTQTLGFSQGGPNTMANQAKNWLPGPCYRQQRVSTTTGQNNNSNFAWTAGTKYHLNGRNSLANPGIAMATHKDDKERFFPSNGILIFGKQNAARDNADYSDVMLTSEEEIKTTNPVATEEYGIVADNLQQQNTAPQIGTVNSQGALPGMVWQNRDVYLQGPIWAKIPHTDGNFHPSPLMGGFGLKHPPPQILIKNTPVPADPPTTFNQSKLNSFITQYSTGQVSVEIEWELQKENSKRWNPEIQYTSNYYKSTSVDFAVNTEGVYSEPHPIGTRYLTRPL

SEQ ID NO: 1108 - protein, 734 aa, Artificial Sequence
  Description of Artificial Sequence: Synthetic polypeptide
MAADGYLPDWLEDTLSEGIRQWWKLKPGPPPPKPAERHKDDSRGLVLPGYKYLGPFNGLDKGEPVNEADAAALEHDKAYDQQLQAGDNPYLRYNHADAEFQERLQGDTSFGGNLGRAVFQAKKRLLEPLGLVEEAAKTAPGKKRPVEQSPQEPDSSAGIGKSGAQPAKKRLNFGQTGDTESVPDPQPIGEPPAAPSGVGSLTMASGGGAPVADNNEGADGVGSSSGNWHCDSQWLGDRVITTSTRTWALPTYNNHLYKQISSASTGASNDNHYFGYSTPWGYFDFNRFHCHFSPRDWQRLINNNWGFRPKRLSFKLFNHPGQGGHAERHQDHRQPHQHIQVFTDSEYQLPYVLGSAHQGCLPPFPADVFMIPQYGYLTLNNGSQAVGRSSFYCLEYFPSQMLRTGNNFQFTYTFEDVPFHSSYAHSQSLDRLMNPLIDQYLYYLSRTQTTGGTANTQTLGFSQGGPNTMANQAKNWLPGPCYRQQRVSTTTGQNNNSNFAWTAGTKYHLNGRNSLGNPGIAMATHKDDKERFFPSNGILIFGKQNAARDNADYSDVMLTSEEEIKTTNPVATEEYGIVADNLQQQNTAPQIGTVNSQGALPGMVWQNRDVYLQGPIWAKIPHTDGNFHPSPLMGGFGLKHPPPQILIKNTPVPADPPTAFNQSKLNSFITQYSTGQVSVEIEWELQKENSKRWNPEIQYTSNYYKSTSVDFAVNTEGVYSEPHPIGTRYLTRPL

SEQ ID NO: 1109 - protein, 737 aa, Artificial Sequence
  Description of Artificial Sequence: Synthetic polypeptide
MAADGYLPDWLEDNLSEGIREWWDLKHGAPKPKANQQKQDDGRGLVLPGYKYLGPFNGLDKGEPVNAADAAALEHDKAYDQQLKAGDNPYLRYNHADAEFQERLQEDTSFGGNLGRAVFQAKKRVLEPFGLVEEGAKTAPGKKRPVEQSPQEPDSSSGIGKTGQQPAKKRLNFGQTGDSESVPDPQPLGEPPATPAAVGPTTMASGGGAPMADNNEGADGVGNASGNWHCDSTWLGDRVITTSTRTWALPTYNNHLYKQISNGTSGGSTNDNTYFGYSTPWGYFDFNRFHCHFSPRDWQRLINNNWGFRPKRLNFKLFNIQVKEVTQNEGTKTIANNLTSTIQVFTDSEYQLPYVLGSAHQGCLPPFPADVFMIPQYGYLTLNNGSQAVGRSSFYCLEYFPSQMLRTGNNFTFSYTFEDVPFHSSYAHSQSLDRLMNPLIDQYLYYLSRTQTTGGTANTQTLGFSQGGPNTMANQAKNWLPGPCYRQQRVSTTTGQNNNSNFAWTAGTKYHLNGRNSLANPGIAMATHKDDKERFFPSNGILIFGKQNAARDNADYSDVMLTSEEEIKTTNPVATEEYGIVADNLQQQNTAPQIGTVNSQGALPGMVWQNRDVYLQGPIWAKIPHTDGNFHPSPLMGGFGLKHPPPQILIKNTPVPADPPTTFNQSKLNSFITQYSTGQVSVEIEWELQKENSKRWNPEIQYTSNYYKSTSVDFAVNTEGVYSDPHPIGTRYLTRPL

SEQ ID NO: 1110 - protein, 737 aa, Artificial Sequence
  Description of Artificial Sequence: Synthetic polypeptide
MAADGYLPDWLEDNLSEGIREWWALKPGAPKPKANQQKQDDGRGLVLPGYKYLGPFNGLDKGEPVNEADAAALEHDKAYDQQLKAGDNPYLRYNHADAEFQERLQEDTSFGGNLGRAVFQAKKRVLEPLGLVEEGAKTAPGKKRPVEPSPQRSPDSSTGIGKKGQQPARKRLNFGQTGDSESVPDPQPLGEPPAAPSGVGPNTMASGGGAPMADNNEGADGVGNSSGNWHCDSTWMGDRVITTSTRTWALPTYNNHLYKQISSASTGASNDNHYFGYSTPWGYFDFNRFHCHFSPRDWQRLINNNWGFRPKRLNFKLFNIQVKEVTQNEGTKTIANNLTSTIQVFTDSEYQLPYVLGSAHQGCLPPFPADVFMIPQYGYLTLNNGSQAVGRSSFYCLEYFPSQMLRTGNNFQFTYTFEDVPFHSSYAHSQSLDRLMNPLIDQYLYYLSRTQTTGGTANTQTLGFSQGGPNTMANQAKNWLPGPCYRQQRVSTTTGQNNNSNFAWTAGTKYHLNGRNSLANPGIAMATHKDDKERFFPSNGILIFGKQNAARDNADYSDVMLTSEEEIKTTNPVATEEYGIVADNLQQQNTAPQIGTVNSQGALPGMVWQNRDVYLQGPIWAKIPHTDGNFHPSPLMGGFGLKHPPPQILIKNTPVPADPPTTFNQSKLNSFITQYSTGQVSVEIEWELQKENSKRWNPEIQYTSNYYKSTSVDFAVNTEGVYSEPHPIGTRYLTRPL

SEQ ID NO: 1111 - protein, 736 aa, Artificial Sequence
  Description of Artificial Sequence: Synthetic polypeptide
  MOD_RES (226)..(226): Any naturally occurring amino acid
MAADGYLPDWLEDTLSEGIRQWWKLKPGPPPPKPAERHKDDSRGLVLPGYKYLGPFNGLDKGEPVNEADAAALEHDKAYDRQLDSGDNPYLKYNHADAEFQERLKEDTSFGGNLGRAVFQAKKRVLEPLGLVEEPVKTAPGKKRPVEQSPQEPDSSSGIGKKGQQPAKKRLNFGQTGDSESVPDPQPLGEPPATPAAVGPTTMASGGGAPMADNNEGADGVGNASXNWHCDSTWLGDRVITTSTRTWALPPITTTSTSKSPVLQRGRSNDNHYFGYSTPWGYFDFNRFHCHFSPRDWQRLINNNWGFRPKRLNFKLFNIQVKEVTDNNGVKTIANNLTSTVQVFTDSDYQLPYVLGSAHQGCLPPFPADVFMIPQYGYLTLNNGSQAVGRSSFYCLEYFPSQMLRTGNNFQFTYTFEDVPFHSSYAHSQSLDRLMNPLIDQYLYYLSRTQTTGGTANTQTLGFSQGGPNTMANQAKNWLPGPCYRQQRVSTTTGQNNNSNFAWTAGTKYHLNGRNSLANPGIAMATHKDDKERFFPSNGILIFGKQNAARDNADYSDVMLTSEEEIKTTNPVATEEYGIVADNLQQQNTAPQIGTVNSQGALPGMVWQNRDVYLQGPIWAKIPHTDGNFHPSPLMGGFGLKHPPPQILIKNTPVPADPPTTFNQSKLNSFITQYSTGQVSVEIEWELQKENSKRWNPEIQYTSNYYKSTNVDFAVNTEGVYSEPHPIGTRYLTRPL

SEQ ID NO: 1112 - protein, 736 aa, Artificial Sequence
  Description of Artificial Sequence: Synthetic polypeptide
  MOD_RES (239)..(239): Any naturally occurring amino acid
MAADGYLPDWLEDNLSEGIREWWDLKPGAPKPKANQQKQDDGRGLVLPGYKYLGPFNGLDKGEPVNAADAAALEHDKAYDQQLQAGDNPYLRYNHADAEFQERLQGDTSFGGNLGRAVFQAKKRVLEPLGLVEEAAKTAPGKKRPVEQSPQEPDSSAGIGKSGAQPAKKRLNFGQTGDTESVPDPQPIGEPPAAPSGVGPNTMAAGGGAPMADNNEGADGVGSSSGNWHCDSTWLGDRXITTSTRTWALPTYNNHLYKQISSASTGASNDNHYFGYSTPWGYFDFNRFHCHFSPRDWQRLINNNWGFRPKRLNFKLFNIQVKEVTDNNGVKTIANNLTSTVQVFTDSEYQLPYVLGSAHQGCLPPFPADVFMIPQYGYLTLNNGSQAVGRSSFYCLEYFPSQMLRTGNNFTFSYTFEDVPFHSSYAHSQSLDRLMNPLIDQYLYYLSRTQTTGGTANTQTLGFSQGGPNTMANQAKNWLPGPCYRQQRVSTTTGQNNNSNFAWTAGTKYHLNGRNSLANPGIAMATHKDDKERFFPSNGILIFGKQNAARDNADYSDVMLTSEEEIKTTNPVATEEYGIVADNFQQQNTAPQIGTVNSQGALPGMVWQNRDVYLQGPIWAKIPHTDGNFHPSPLMGGFGLKHPPPQILIKNTPVPADPPTTFNQSKLNSFITQYSTGQVSVEIEWELQKENSKRWNPEIQYTSNYYKSTSVDFAVNTEGVYSEPHPIGTRYLTRPL

SEQ ID NO: 1113 - protein, 736 aa, Artificial Sequence
  Description of Artificial Sequence: Synthetic polypeptide
MAADGYLPDWLEDNLSEGIREWWALKPGAPKPKANQQKQDDGRGLVLPGYKYLGPFNGLDKGEPVNEADAAALEHDKAYDQQLKAGDNPYLKYNHADAEFQERLQEDTSFGGNLGRAVFQAKKRLLEPLGLVEEAAKTAPGKKRPVEQSPQEPDSSAGIGKSGAQPAKKRLNFGQTGDTESVPDPQPLGEPPATPAAVGPTTMASGGGAPMADNNEGADGVGNASGNWHCDSTWLGDRVITTSTRTWALPTYNNHLYKQISSASTGASNDNHYFGYSTPWGYFDFNRFHCHFSPRDWQRLINNNWGFRPKRLSFKLFNIQVKEVTQNEGTKTIANNLTSTIQVFTDSEYQLPYVLGSAHQGCLPPFPADVFMIPQYGYLTLNNGSQAVGRSSFYCLEYFPSQMLRTGNNFQFTYTFEDVPFHSSYAHSQSLDRLMNPLIDQYLYYLSRTQTTGGTANTQTLGFSQGGPNTMANQAKNWLPGPCYRQQRVSTTTGQNNNSNFAWTAGTKYHLNGRNSLANPGIAMATHKDDKERFFPSNGILIFGKQNAARDNADYSDVMLTSEEEIKTTNPVATEEYGIVADNLQQQNTAPQIGTVNSQGALPGMVWQNRDVYLQGPIWAKIPHTDGNFHPSPLMGGFGLKHPPPQILIKNTPVPADPPTTFNQSKLNSFITQYSTGQVSVEIEWELQKENSKRWNPEIQYTSNYYKSTSVDFAVNTEGVYSEPHPIGTRYLTRPL

SEQ ID NO: 1114 - protein, 736 aa, Artificial Sequence
  Description of Artificial Sequence: Synthetic polypeptide
MAADGYLPDWLEDTLSEGIRQWWKLKPGPPPPKPAERHKDDSRGLVLPGYKYLGPFNGLDKGEPVNEADAAALEHDKAYDQQLQAGDNPYLRYNHADAEFQERLQGDTSFGGNLGRAVFQAKKRLLEPLGLVEEAAKTAPGKKRPVEQSPQEPDSSAGIGKSGAQPAKKRLNFGQTGDTESVPDPQPIGEPPAAPSGVGSLTMASGGGAPVADNNEGADGVGSSSGNWHCDSQWLGDRVITTSTRTWALPTYNNHLYKQISSASTGASNDNHYFGYSTPWGYFDFNRFHCHFSPRDWQRLINNNWGFRPKRLSFKLFNIQVKEVTQNEGTKTIANNLTSTIQVFTDSEYQLPYVLGSAHQGCLPPFPADVFMIPQYGYLTLNNGSQAVGRSSFYCLEYFPSQMLRTGNNFQFTYTFEDVPFHSSYAHSQSLDRLMNPLIDQYLYYLSRTQTTGGTANTQTLGFSQGGPNTMANQAKNWLPGPCYRQQRVSTTTGQNNNSNFAWTAGTKYHLNGRNSLANPGIAMATHKDDKERFFPSNGILIFGKQNAARDNADYSDVMLTSEEEIKTTNPVATEEYGIVADNLQQQNTAPQIGTVNSQGALPGMVWQNRDVYLQGPIWAKIPHTDGNFHPSPLMGGFGLKHPPPQILIKNTPVPADPPTTFNQSKLNSFITQYSTGQVSVEIEWELQKENSKRWNPEIQYTSNYYKSTSVDFAVNTEGVYSEPHPIGTRYLTRPL

SEQ ID NO: 1115 - protein, 738 aa, Artificial Sequence
  Description of Artificial Sequence: Synthetic polypeptide
MAADGYLPDWLEDNLSEGIRQWWKLKPGPPPPKPAERHKDDSRGLVLPGYKYLGPFNGLDKGEPVNAADAAALEHDKAYDQQLKAGDNPYLRYNHADAEFQERLQEDTSFGGNLGRAVFQAKKRVLEPLGLVEEGAKTAPGKKRPVEPSPQRSPDSSTGIGKKGQQPAKKRLNFGQTGDSESVPDPQPLGEPPATPAAVGPTTMASGGGAPMADNNEGADGVGNASGNWHCDSTWLGDRVITTSTRTWALPTYNNHLYKQISNGTSGGSTNDNTYFGCVTPWGYFDFNKFHCHFSPDDWQRLINNGWGFRTKRLNFKLFSMKVKKGTDNTGIKTIANNLTNTVHVFADSEYQLPYVLGSAHQGCLPPFPADVFMIPQYGYLTLNNGSQAVGRSSFYCLEYFPSQMLRTGNNFTFSYTFEDVPFHSSYAHSQSLDRLMNPLIDQYLYYLSRTQTTGGTANTQTLGFSQGGPNTMANQAKNWLPGPCYRQQRVSTTTGQNNNSNFAWTAGTKYHLNGRNSLANPGIAMATHKDDKERFFPSNGILIFGKQNAARDNADYSDVMLTSEEEIKTTNPVATEEYGIVADNLQQQNTAPQIGTVNSQGALPGMVWQNRDVYLQGPIWAKIPHTDGNFHPSPLMGGFGLKHPPPQILIKNTPVPADPPTTFNQSKLNSFITQYSTGQVSVEIEWELQKENSKRWNPEIQYTSNYYKSTSVDFAVNTEGVYSEPHPIGTRYLTRPL

SEQ ID NO: 1116 - protein, 737 aa, Artificial Sequence
  Description of Artificial Sequence: Synthetic polypeptide
MAADGYLPDWLEDTLSEGIRQWWKLKPGPPPPKPAERHKDDSRGLVLPGYKYLGPFNGLDKGEPVNAADAAALEHDKAYDQQLKAGDNPYLRYNHADAEFQERLQEDTSFGGNLGRAVFQAKKRVLEPLGLVEEGAKTAPGKKRPVEPSPQRSPDSSTGIGKKGQQPAKKRLNFGQTGDSESVPDPQPIGEPPAGPSGLGSGTMAAGGGAPMADNNEGADGVGSSSGNWHCDSTWLGDRVITTSTRTWALPTYNNHLYKQISSASTGASNDNHYFGYSTPWGYFDFNRFHCHFSPRDWQRLINNNWGFRPKRLNFKLFNIQVKEVTDNNGVKTIANNLTSTVQVFTDSEYQLPYVLGSAHQGCLPPFPADVFMIPQYGYLTLNNGSQAVGRSSFYCLEYFPSQMLRTGNNFTFSYTFEDVPFHSSYAHSQSLDRLMNPLIDQYLYYLSRTQTTGGTANTQTLGFSQGGPNTMANQAKNWLPGPCYRQQRVSTTTGQNNNSNFAWTAGTKYHLNGRNSLANPGIAMATHKDDKERFFPSNGILIFGKQNAARDNADYSDVMLTSEEEIKTTNPVATEEYGIVADNLQQQNTAPQIGTVNSQGALPGMVWQNRDVYLQGPIWAKILHTDGNFHPSPLMGGFGMKHPPPPILIKNTPVPADPPTTFNQSKLNSFITQYSTGQVSVEIEWELPKENSKRWNPEIQYTSNYYKSTSVDFAVNTEGVYYEPHPIGTRYLTPPL

SEQ ID NO: 1117 - protein, 737 aa, Artificial Sequence
  Description of Artificial Sequence: Synthetic polypeptide
MAADGYLPDWLEDNLSEGIREWWALKPGAPKPKANQQKQDDGRGLVLPGYKYLGPFNGLDKGEPVNAADAAALEHDKAYDQQLKAGDNPYLRYNHADAEFQERLQEDTSFGGNLGRAVFQAKKRVLEPLGLVEEGAKTAPGKKRPVEPSPQRSPDSSTGIGKKGQQPARKRLNFGQTGDSESVPDPQPLGEPPAAPSGVAPNTMAAGGGAPMADNNEGADGVGNASGNWHCDSTWLGDRVITTSTRTWALPTYNNHLYKQISSASTGASNDNHYFGYSTPWGYFDFNRFHCHFSPRDWQRLITTIGGFRPKRLNFKLFNIQVKEVTDNNGVKTIANNLTSTVQVFTDSEYQLPYVLGSAHQGCLPPFPADVFMIPQYGYLTLNNGSQAVGRSSFYCLEYFPSQMLRTGNNFTFSYTFEDVPFHSSYAHSQSLDRLMNPLIDQYLYYLSRTQTTGGTANTQTLGFSQGGPNTMANQAKNWLPGPCYRQQRVSTTTGQNNNSNFAWTAGTKYHLNGRNSLANPGIAMATHKDDKERFFPSNGILIFGKQNAARDNADYSDVMLTSEEEIKTTNPVATEEYGIVADNLQQQNTAPQIGTVNSQGALPGMVWQNRDVYLQGPIWAKIPHTDGNFHPSPLMGGFGLKHPPPQILIKNTPVPADPPTTFNQSKLNSFITQYSTGQVSVEIEWELQKENSKRWNPEIQYTSNYYKSTSVDFAVNTEGVYSEPHPIGTRYLTRPL

SEQ ID NO: 1118 - protein, 736 aa, Artificial Sequence
  Description of Artificial Sequence: Synthetic polypeptide
MAADGYLPDWLEDTLSEGIRQWWKLKPGPPPPKPAERHKDDGRGLVLPGYKYLGPFNGLDKGEPVNAADAAALEHDKAYDQQLKAGDNPYLRYNHADAEFQERLQEDTSFGGNLGRAVFQAKKRVLEPLGLVEEPVKTAPGKKRPVEQSPQEPDSSSGIGKKGQQPAKKRLNFGQTGDSESVPDPQPLGEPPATPAAVGPTTMASGGGAPMADNNEGADGVGNASGNWHCDSTWMGDRVITTSTRTWALPTYNNHLYKQISSASTGASNDNHYFGYSTPWGYFDFNRFHCHFSPRDWQRLINNNWGFRPKRLNFKLFNIQVKEVTQNEGTKTIANNLTSTIQVFTDSEYQLPYVLGSAHQGCLPPFPADVFMIPQYGYLTLNNGSQAVGRSSFYCLEYFPSQMLRTGNNFQFTYTFEDVPFHSSYAHSQSLDRLMNPLIDQYLYYLSRTQTTGGTANTQTLGFSQGGPNTMANHAKNWLPGPCYRQQRVSTTTGQNNNSNFAWTAGTKYHLNGRNSLANPGIAMATHKDDKERFFPSNGILIFGKQNAARDNADYSDVMLTSEEEIKTTNPVATEEYGIVADNLQQQNTAPQIGTVNSQGALPGMVWQNRDVYLQGPIWAKIPHTDGNFHPSPLMGGFGLKHPPPQILIKNTPVPADPPTTFNQSKLNSFITQYSTGQVSVEIEWELQKENSKRWNPEIQYTSNYYKSTSVDFAVNTEGVYSEPHPIGTRYLTRPL

SEQ ID NO: 1119 - protein, 737 aa, Artificial Sequence
  Description of Artificial Sequence: Synthetic polypeptide
MAADGYLPDWLEDNLSQGIREWWDLKPGAPKPKANQQKQDDGRGLVLPGYKYLGPFNGLDKGEPVNAADAAALEHDKAYDQQLKAGDNPYLRYNHADAEFQERLQEDTSFGGNLGRAVFQAKKRVLEPLGLVEEGAKTAPGKKRPVEPSPQRSPDSSTGIGKKGQQPARKRLNFGQTGDSESVPDPQPLGEPPAAPAAVGPTTMASGGGAPMADNNEGADGVGSSSGNWHCDSQWLGDRVITTSTRTWALPTYNNHLYKQISSASTGASNDNHYFGYSTPWGYFDFNRFHCHFSPRDWQRLINNNWGFRPKRLSFKLFNIQVKEVTQNEGTKTIANNLTSTIQVFTDSEYQLPYVLGSAHQGCLPPFPADVFMIPQYGYLTLNNGSQAVGRSSFYCLEYFPSQMLRTGNNFQFTYTFEDVPFHSSYAHSQSLDRLMNPLIDQYLYYLSRTQTTGGTTNAQTLGFSQGGPNTMANQAKNWLPGPCYRQQRVSTTTGQNNNSNFAWTAGTKYHLNGRNSLANPGIAMATHKDDKERFFPSNGILIFGKQNAARDNADYSDVMLTSEEEIKTTNPVATEEYGIVADNLQQQNTAPQIGTVNSQGALPGMVWQNRDVYLQGPIWAKIPHTDGNFHPSPLMGGFGLKHPPPQILIKNTPVPADPPTTFNQSKLNSFITQYSTGQVSVEIEWELQKENSKRWNPEIQYTSNYYKSTNVDFAVNTEGVYSEPHPIGTRYLTRPL

SEQ ID NO: 1120 - protein, 736 aa, Artificial Sequence
  Description of Artificial Sequence: Synthetic polypeptide
MAADGYLPDWLEDNLSEGIREWWDLKPGAPKPKANQQKQDDGRGLVLPGYKYLGPFNGLDKGEPVNAADAAALEHDKAYDQQLKAGDNPYLRYNHADAEFQERLQEDTSFGGNLGRAVFQAKKRVLEPFGLVEEGAKTAPGKKRPVEQSPQEPDSSSGIGKTGQQPAKKRLNFGQTGDTESVPDPQPIGEPPAAPSGVGPNTMAAGGGAPMADNNEGADGVGSSSGNWHCDSTWMGDRVITTSTRTWALPTYNNHLYKQISSASTGASNDNHYFGYSTPWGYFDFNRFHCHFSPRDWQRLINNNWGFRPKRLNFKLFNIQVKEVTQNEGTKTIANNLTSTIQVFTDSEYQLPYVLGSAHQGCLPPFPADVFMIPQYGYLTLNNGSQAVGRSSFYCLEYFPSQMLRTGNNFQFTYTFEDVPFHSSYAHSQSLDRLMNPLIDQYLYYLSRTQTTGGTANTQTLGFSQGGPNTMANQAKNWLPGPCYRQQRVSTTTGQNNNSNFAWTAGTKYHLNGRNSLANPGIAMATHKDDKERFFPSNGILIFGKQNAARDNADYSDVMLTSEEEIKTTNPVATEEYGIVADNLQQQNTAPQIGTVNSQGALPGMVWQNRDVYLQGPIWAKIPHTDGNFHPSPLMGGFGLKHPPPQILIKNTPVPADPPTTFNQSKLNSFITQYSTGQVSVEIEWELQKENSKRWNPEIQYTSNYYKSTNVDFAVNTEGVYSEPHPIGTRYFTRPL

SEQ ID NO: 1121 - protein, 736 aa, Artificial Sequence
  Description of Artificial Sequence: Synthetic polypeptide
MAADGYLPDWLEDNLSEGIREWWDLKPGAPKPKANQQKQDDGRGLVLPGYKYLGPFNGLDKGEPVNAADAAALEHDKAYDQQLKAGDNPYLRYNHADAEFQERLQEDTSFGGNLGRAVFQAKKRVLEPLGLVEEGAKTAPGKKRPVEQSPQEPDSSSGIGKTGQQPAKKRLNFGQTGDSESVPDPQPLGEPPATPAAVGPTTMASGGGAPMADNNEGADGVGNSSGNWHCDSTWMGDRVITTSTRTWALPTYNNHLYKQISSASTGASNDNHYFGYSTPWGYFDFNRFHCHFSPRDWQRLINNNWGFRPKRLNFKLFNIQVKEVTDNNGVKTIANNLTSTVQVFTDSEYQLPYVLGSAHQGCLPPFPADVFMIPQYGYLTLNNGSQAVGRSSFYCLEYFPSQMLRTGNNFQFTYTFEDVPFHSSYAHSQSLDRLMNPLIDQYLYYLSRTQTTGGTANTQTLGFSQGGPNTMANQAKNWLPGPCYRQQRVSTTTGQNNNSNFAWTAGTKYHLNGRNSLANPGIAMATHKDDKERFFPSNGILIFGKQNAARDNADYSDVMLTSEEEIKTTNPVATEEYGIVADNLQQQNTAPQIGTVNSQGALPGMVWQNRDVYLQGPIWAKIPHTDGNFHPSPLMGGFGLKHPPPQILIKNTPVPADPPTTFNQSKLNSFITQYSTGQVSVEIEWELQKENSKRWNPEIQYTSNYYKSTNVDFAVNTEGVYSEPHPIGTRYLTRPL

SEQ ID NO: 1122 - protein, 736 aa, Artificial Sequence
  Description of Artificial Sequence: Synthetic polypeptide
MAADGYLPDWLEDNLSEGIREWWDLKPGAPKPKANQQKQDDGRGLVLPGYKYLGPFNGLDKGEPVNAADAAALEHDKAYDQQLKAGDNPYLRYNHADAEFQERLQEDTSFGGNLGRAVFQAKKRVLEPLGLVEEGAKTAPGKKRPVEQSPQEPDSSSGIGKTGQQPAKKRLNFGQTGDSESVPDPQPLGEPPATPAAVGPTTMASGGGAPMADNNEGADGVGNASGNWHCDSTWLGDRVITTSTRTWALPTYNNHLYKQISSASTGASNDNHYFGYSTPWGYFDFNRFHCHFSPRDWQRLINNNWGFRPKRLNFKLFNIQVKEVTQNEGTKTIANNLTSTIQVFTDSEYQLPYVLGSAHQGCLPPFPADVFMIPQYGYLTLNNGSQAVGRSSFYCLEYFPSQMLRTGNNFEFSYQFEDVPFHSSYAHSQSLDRLMNPLIDQYLYYLSRTQTTGGTANTQTLGFSQGGPNTMANQAKNWLPGPCYRQQRVSTTTGQNNNSNFAWTAGTKYHMNGRNSLVNPGIAMATHKDDKERFFPSNGILIFGKQNVARDNADYSDVMLTSEEEIKTTNPVATEEYGIVADNLQQQNTAPQIGTVNSQGALPGMVWQNRDVYLQGPIWAKIPHTDGNFHPSPLMGGFGLKHPPPQILIKNTPVPADPPTTFNQSKLNSFITQYSTGQVSVEIEWELQKENSKRWNPEIQYTSNYYKSTSVDFAVNTEGVYSEPHPIGTRYLTRPL

SEQ ID NO: 1123 - DNA, 2217 bp, Artificial Sequence
  Description of Artificial Sequence: Synthetic polynucleotide
atggctgccgatggttatcttccagattggctcgaggacaacctctctgagggcattcgcgagtggtgggcgctgaaacctggagccccgaagcccaaagccaaccagcaaaagcaggacgacggccggggtctggtgcttcctggctacaagtacctcggacccttcaacggactcgacaagggggagcccgtcaacgcggcggacgcagcggccctcgagcacgacaaggcctacgaccagcagctgcaggcgggtgacaatccgtacctgcggtataaccacgccgacgccgagtttcaggagcgtctgcaagaagatacgtcttttgggggcaacctcgggcgagcagtcttccaggccaagaagcgggttctcgaacctctcggtctggttgaggaaggcgctaagacggctcctggaaagaagagaccggtagagccatcaccccagcgttctccagactcctctacgggcatcggcaagaaaggccaacagcccgccagaaaaagactcaattttggtcagactggcgactcagagtcagttccagaccctcaacctctcggagaacctccagcagcgccctctggtgtgggacctaatacaatggctgcaggcggtggcgcaccaatggcagacaataacgaaggcgccgacggagtgggtagttcctcgggaaattggcattgcgattccacatggctgggcgacagagtcatcaccaccagcacccgaacctgggccctgcccacctacaacaaccacctctacaagcaaatctccaacgggacatcgggaggagccaccaacgacaacacctacttcggctacagcaccccctgggggtattttgactttaacagattccactgccacttttcaccacgtgactggcagcgactcatcaacaacaactggggattccggcccaagagactcagcttcaagctcttcaacatccaggtcaaggaggtcacgcagaatgaaggcaccaagaccatcgccaataacctcaccagcaccatccaggtgtttacggactcggagtaccagctgccgtacgttctcggctctgcccaccagggctgcctgcctccgttcccggcggacgtgttcatgattccccagtacggctacctaacactcaacaacggtagtcaggccgtgggacgctcctccttctactgcctggaatactttccttcgcagatgctgagaaccggcaacaacttccagtttacttacaccttcgaggacgtgcctttccacagcagctacgcccacagccagagcttggaccggctgatgaatcctctgattgaccagtacctgtactacttgtctcggactcaaacaacaggaggcacggcaaatacgcagactctgggcttcagccaaggtgggcctaatacaatggccaatcaggcaaagaactggctgccaggaccctgttaccgccaacaacgcgtctcaacgacaaccgggcaaaacaacaatagcaactttgcctggactgctgggaccaaataccatctgaatggaagaaattcattggctaatcctggcatcgctatggcaacacacaaagacgacgaggagcgtttttttcccagtaacgggatcctgatttttggcaaacaaaatgctgccagagacaatgcggattacagcgatgtcatgctcaccagcgaggaagaaatcaaaaccactaaccctgtggctacagaggaatacggtatcgtggcagataacttgcagcagcaaaacacggctcctcaaattggaactgtcaacagccagggggccttacccggtatggtttggcagaaccgggacgtgtacctgcagggtcccatctgggccaagattcctcacacggacggcaacttccacccgtctccgctgatgggcggctttggcctgaaacatcctccgcctcagatcctgatcaagaacacgcctgtacctgcggatcctccgaccaccttcaaccagtcaaagctgaactctttcatcacgcaatacagcaccggacaggtcagcgtggaaattgaatgggagctgcagaaggaaaacagcaagcgctggaaccccgagatccagtacacctccaactactacaaatctacaagtgtggactttgctgttaatacagaaggcgtgtactctgaaccccgccccattggcacccgttacctcacccgtaatctgtaa

SEQ ID NO: 1124 - protein, 738 aa, Artificial Sequence; identical to SEQ ID NO: 114
  Description of Artificial Sequence: Synthetic polypeptide

SEQ ID NO: 1125 - protein, 735 aa, Artificial Sequence
  Description of Artificial Sequence: Synthetic polypeptide
MAADGYLPDWLEDNLSEGVREWWALQPGAPKPKANQQHQDNARGLVLPGYKYLGPGNGLDKGEPVNAADAAALEHDKAYDQQLKAGDNPYLKYNHADAEFQQRLQGDTSFGGNLGRAVFQAKKRVLEPLGLVEQAGETAPGKKRPLIESPQQPDSSTGIGKKGKQPAKKKLVFEDETGAGDGPPEGSTSGAMSDDSEMRAAAGGAAVEGGQGADGVGNASGDWHCDSTWSEGHVTTTSTRTWVLPTYNNHLYKRLGESLQSNTYNGFSTPWGYFDFNRFHCHFSPRDWQRLINNNWGMRPKAMRVKIFNIQVKEVTTSNGETTVANNLTSTVQIFADSSYELPYVMDAGQEGSLPPFPNDVFMVPQYGYCGLVTGNTSQQQTDRNAFYCLEYFPSQMLRTGNNFEITYSFEKVPFHSMYAHSQSLDRLMNPLIDQYLWGLQSTTTGTTLNAGTATTNFTKLRPTNFSNFKKNWLPGPSIKQQGFSKTANQNYKIPATGSDSLIKYETHSTLDGRWSALTPGPPMATAGPADSKFSNSQLIFAGPKQNGNTATVPGTLIFTSEEELAATNATDTDMWGNLPGGDQSNSNLPTVDRLTALGAVPGMVWQNRDIYYQGPIWAKIPHTDGHFHPSPLIGGFGLKHPPPQIFIKNTPVPANPATTFSSTPVNSFITQYSTGQVSVQIDWEIQKERSKRWNPEVQFTSNYGQQNSLLWAPDAAGKYTEPRAIGTRYLTHHL

SEQ ID NO: 1126 - protein, 735 aa, Artificial Sequence
  Description of Artificial Sequence: Synthetic polypeptide
MAADGYLPDWLEDNLSEGVREWWALQPGAPKPKANQQHQDNARGLVLPGYKYLGPGNGLDKGEPVNAADAAALEHDKAYDQQLKAGDNPYLKYNHADAEFQQRLQGDTSFGGNLGRAVFQAKKRVLEPLGLVEQAGETAPGKKRPLIESPQQPDSSTGIGKKGKQPAKKKLVFEDETGAGDGPPEGSTSGAMSDDSEMRAAAGGAAVEGGQGADGVGNASGDWHCDSTWSEGHVTTTSTRTWVLPTYNNHLYKRLGESLQSNTYNGFSTPWGYFDFNRFHCHFSPRDWQRLINNNWGMRPKAMRVKIFNIQVKEVTTSNGETTVANNLTSTVQIFADSSYELPYVMDAGQEGSLPPFPNDVFMVPQYGYCGLVTGNTSQQQTDRNAFYCLEYFPSQMLRTGNNFEITYSFEKVPFHSMYAHSQSLDRLMNPLIDQYLWGLQSTTTGTTLNAGTATTNFTKLRPTNFSNFKKNWLPGPSIKQQGFSKTANQNYLIPATGSDSLIRYETHSTLDGRWSALTPGPPMATAGPADSKFSNSQLIFAGPKQNGNTATVPGTLIFTSEEELAATNATDTDMWGNLPFRDLSSSNLPTVDRSTPLGAVPGMVWQNRDIYYQGPIWAKIPHTDGHFHPSPLIGGFGLKHPPPQIFIKNTPVPANPATTFSSTPVNSFITQYSTGQVSVQIDWEIQKERSKRWNPEVQFTSNYGQQNSLLWAPDAAGKYTEPRAIGTRYLTHHL

SEQ ID NO: 1127 - protein, 735 aa, Artificial Sequence
  Description of Artificial Sequence: Synthetic polypeptide
MAADGYLPDWLEDNLSEGVREWWALQPGAPKPKANQQHQDNARGLVLPGYKYLGPGNGLDKGEPVNAADAAALEHDKAYDQQLKAGDNPYLKYNHADAEFQQRLQGDTSFGGNLGRAVFQAKKRVLEPLGLVEQAGETAPGKKRPLIESPQQPDSSTGIGKKGKQPAKKKLVFEDETGAGDGPPEGSTSGAMSDDSEMRAAAGGAAVEGGQGADGVGNASGDWHCDSTWSEGHVTTTSTRTWVLPTYNNHLYKRLGESLQSNTYNGFSTPWGYFDFNRFHCHFSPRDWQRLINNNWGMRPKAMRVKIFNIQVKEVTTSNGETTVANNLTSTVQIFADSSYELPYVMDAGQEGSLPPFPNDVFMVPQYGYCGLVTGNTSQQQTDRNAFYCLEYFPSQMLRTGNNFEITYSFEKVPFHSMYAHSQSLDRLMNPLIDQYLWGLQSTTTGTTLNAGTATTNFTKLRPTNFSNFKKNWLPGPSIKQQGFSKTANQNYYIPATGSDSLILYETHSTLDGRWSALTPGPPMATAGPADSKFSNSQLIFAGPKQNGNTATVPGTLIFTSEEELAATNATDTDMWGNLPGGDQSNSNLPTVDRLTALGAVPGMVWQNRDIYYQGPIWAKIPHTDGHFHPSPLIGGFGLKHPPPQIFIKNTPVPANPATTFSSTPVNSFITQYSTGQVSVQIDWEIQKERSKRWNPEVQFTSNYGQQNSLLWAPDAAGKYTEPRAIGTRYLTHHL

SEQ ID NO: 1128 - protein, 735 aa, Artificial Sequence
  Description of Artificial Sequence: Synthetic polypeptide
MAADGYLPDWLEDNLSEGVREWWALQPGAPKPKANQQHQDNARGLVLPGYKYLGPGNGLDKGEPVNAADAAALEHDKAYDQQLKAGDNPYLKYNHADAEFQQRLQGDTSFGGNLGRAVFQAKKRVLEPLGLVEQAGETAPGKKRPLIESPQQPDSSTGIGKKGKQPAKKKLVFEDETGAGDGPPEGSTSGAMSDDSEMRAAAGGAAVEGGQGADGVGNASGDWHCDSTWSEGHVTTTSTRTWVLPTYNNHLYKRLGESLQSNTYNGFSTPWGYFDFNRFHCHFSPRDWQRLINNNWGMRPKAMRVKIFNIQVKEVTTSNGETTVANNLTSTVQIFADSSYELPYVMDAGQEGSLPPFPNDVFMVPQYGYCGLVTGNTSQQQTDRNAFYCLEYFPSQMLRTGNNFEITYSFEKVPFHSMYAHSQSLDRLMNPLIDQYLWGLQSTTTGTTLNAGTATTNFTKLRPTNFSNFKKNWLPGPSIKQQGFSKTANQNYGIPATGSDSLIKYETHSTLDGRWSALTPGPPIATAGPADSKFSNSQLIFAGPKQNGNTATVPGTLIFTSEEELAATNATDTDMWGNLPLYDASSSNLPTVDRLTLLGAVPGMVWQNRDIYYQGPIWAKIPHTDGHFHPSPLIGGFGLKHPPPQIFIKNTPVPANPATTFSSTPVNSFITQYSTGQVSVQIDWEIQKERSKRWNPEVQFTSNYGQQNSLLWAPDAAGKYTEPRAIGTRYLTHHL

SEQ ID NO: 1129 - protein, 735 aa, Artificial Sequence
  Description of Artificial Sequence: Synthetic polypeptide
MAADGYLPDWLEDNLSEGVREWWALQPGAPKPKANQQHQDNARGLVLPGYKYLGPGNGLDKGEPVNAADAAALEHDKAYDQQLKAGDNPYLKYNHADAEFQQRLQGDTSFGGNLGRAVFQAKKRVLEPLGLVEQAGETAPGKKRPLIESPQQPDSSTGIGKKGKQPAKKKLVFEDETGAGDGPPEGSTSGAMSDDSEMRAAAGGAAVEGGQGADGVGNASGDWHCDSTWSEGHVTTTSTRTWVLPTYNNHLYKRLGESLQSNTYNGFSTPWGYFDFNRFHCHFSPRDWQRLINNNWGMRPKAMRVKIFNIQVKEVTTSNGETTVANNLTSTVQIFADSSYELPYVMDAGQEGSLPPFPNDVFMVPQYGYCGLVTGNTSQQQTDRNAFYCLEYFPSQMLRTGNNFEITYSFEKVPFHSMYAHSQSLDRLMNPLIDQYLWGLQSTTTGTTLNAGTATTNFTKLRPTNFSNFKKNWLPGPSIKQQGFSKTANQNYTIPATGSDSLITYETHSTLDGRWSALTPGPPGATAGPADSKFSNSQLIFAGPKQNGNTATVPGTLIFTSEEELAATNATDTDMWGNLPRVDTSASNLPTVDRYTNLGAVPGMVWQNRDIYYQGPIWAKIPHTDGHFHPSPLIGGFGLKHPPPQIFIKNTPVPANPATTFSSTPVNSFITQYSTGQVSVQIDWEIQKERSKRWNPEVQFTSNYGQQNSLLWAPDAAGKYTEPRAIGTRYLTHHL

SEQ ID NO: 1130 - protein, 735 aa, Artificial Sequence
  Description of Artificial Sequence: Synthetic polypeptide
MAADGYLPDWLEDNLSEGVREWWALQPGAPKPKANQQHQDNARGLVLPGYKYLGPGNGLDKGEPVNAADAAALEHDKAYDQQLKAGDNPYLKYNHADAEFQQRLQGDTSFGGNLGRAVFQAKKRVLEPLGLVEQAGETAPGKKRPLIESPQQPDSSTGIGKKGKQPAKKKLVFEDETGAGDGPPEGSTSGAMSDDSEMRAAAGGAAVEGGQGADGVGNASGDWHCDSTWSEGHVTTTSTRTWVLPTYNNHLYKRLGESLQSNTYNGFSTPWGYFDFNRFHCHFSPRDWQRLINNNWGMRPKAMRVKIFNIQVKEVTTSNGETTVANNLTSTVQIFADSSYELPYVMDAGQEGSLPPFPNDVFMVPQYGYCGLVTGNTSQQQTDRNAFYCLEYFPSQMLRTGNNFEITYSFEKVPFHSMYAHSQSLDRLMNPLIDQYLWGLQSTTTGTTLNAGTATTNFTKLRPTNFSNFKKNWLPGPSIKQQGFSKTANQNYSIPATGSDSLIKYETHSTLDGRWSALTPGPPFATAGPADSKFSNSQLIFAGPKQNGNTATVPGTLIFTSEEELAATNATDTDMWGNLPDYDSSLSNLPTVDRDTTLGAVPGMVWQNRDIYYQGPIWAKIPHTDGHFHPSPLIGGFGLKHPPPQIFIKNTPVPANPATTFSSTPVNSFITQYSTGQVSVQIDWEIQKERSKRWNPEVQFTSNYGQQNSLLWAPDAAGKYTEPRAIGTRYLTHHL

SEQ ID NO: 1131 - protein, 735 aa, Artificial Sequence
  Description of Artificial Sequence: Synthetic polypeptide
MAADGYLPDWLEDNLSEGVREWWALQPGAPKPKANQQHQDNARGLVLPGYKYLGPGNGLDKGEPVNAADAAALEHDKAYDQQLKAGDNPYLKYNHADAEFQQRLQGDTSFGGNLGRAVFQAKKRVLEPLGLVEQAGETAPGKKRPLIESPQQPDSSTGIGKKGKQPAKKKLVFEDETGAGDGPPEGSTSGAMSDDSEMRAAAGGAAVEGGQGADGVGNASGDWHCDSTWSEGHVTTTSTRTWVLPTYNNHLYKRLGESLQSNTYNGFSTPWGYFDFNRFHCHFSPRDWQRLINNNWGMRPKAMRVKIFNIQVKEVTTSNGETTVANNLTSTVQIFADSSYELPYVMDAGQEGSLPPFPNDVFMVPQYGYCGLVTGNTSQQQTDRNAFYCLEYFPSQMLRTGNNFEITYSFEKVPFHSMYAHSQSLDRLMNPLIDQYLWGLQSTTTGTTLNAGTATTNFTKLRPTNFSNFKKNWLPGPSIKQQGFSKTANQNYSIPATGSDSLIWYETHSTLDGRWSALTPGPPCATAGPADSKFSNSQLIFAGPKQNGNTATVPGTLIFTSEEELAATNATDTDMWGNLPQGDSSLSNLPTVDRMTVLGAVPGMVWQNRDIYYQGPIWAKIPHTDGHFHPSPLIGGFGLKHPPPQIFIKNTPVPANPATTFSSTPVNSFITQYSTGQVSVQIDWEIQKERSKRWNPEVQFTSNYGQQNSLLWAPDAAGKYTEPRAIGTRYLTHHL

SEQ ID NO: 1132 - protein, 735 aa, Artificial Sequence
  Description of Artificial Sequence: Synthetic polypeptide
MAADGYLPDWLEDNLSEGVREWWALQPGAPKPKANQQHQDNARGLVLPGYKYLGPGNGLDKGEPVNAADAAALEHDKAYDQQLKAGDNPYLKYNHADAEFQQRLQGDTSFGGNLGRAVFQAKKRVLEPLGLVEQAGETAPGKKRPLIESPQQPDSSTGIGKKGKQPAKKKLVFEDETGAGDGPPEGSTSGAMSDDSEMRAAAGGAAVEGGQGADGVGNASGDWHCDSTWSEGHVTTTSTRTWVLPTYNNHLYKRLGESLQSNTYNGFSTPWGYFDFNRFHCHFSPRDWQRLINNNWGMRPKAMRVKIFNIQVKEVTTSNGETTVANNLTSTVQIFADSSYELPYVMDAGQEGSLPPFPNDVFMVPQYGYCGLVTGNTSQQQTDRNAFYCLEYFPSQMLRTGNNFEITYSFEKVPFHSMYAHSQSLDRLMNPLIDQYLWGLQSTTTGTTLNAGTATTNFTKLRPTNFSNFKKNWLPGPSIKQQGFSKTANQNYCIPATGSDSLIRYETHSTLDGRWSALTPGPPLATAGPADSKFSNSQLIFAGPKQNGNTATVPGTLIFTSEEELAATNATDTDMWGNLPYKDSSRSNLPTVDRETSLGAVPGMVWQNRDIYYQGPIWAKIPHTDGHFHPSPLIGGFGLKHPPPQIFIKNTPVPANPATTFSSTPVNSFITQYSTGQVSVQIDWEIQKERSKRWNPEVQFTSNYGQQNSLLWAPDAAGKYTEPRAIGTRYLTHHL

SEQ ID NO: 1133 - protein, 735 aa, Artificial Sequence
  Description of Artificial Sequence: Synthetic polypeptide
MAADGYLPDWLEDNLSEGVREWWALQPGAPKPKANQQHQDNARGLVLPGYKYLGPGNGLDKGEPVNAADAAALEHDKAYDQQLKAGDNPYLKYNHADAEFQQRLQGDTSFGGNLGRAVFQAKKRVLEPLGLVEQAGETAPGKKRPLIESPQQPDSSTGIGKKGKQPAKKKLVFEDETGAGDGPPEGSTSGAMSDDSEMRAAAGGAAVEGGQGADGVGNASGDWHCDSTWSEGHVTTTSTRTWVLPTYNNHLYKRLGESLQSNTYNGFSTPWGYFDFNRFHCHFSPRDWQRLINNNWGMRPKAMRVKIFNIQVKEVTTSNGETTVANNLTSTVQIFADSSYELPYVMDAGQEGSLPPFPNDVFMVPQYGYCGLVTGNTSQQQTDRNAFYCLEYFPSQMLRTGNNFEITYSFEKVPFHSMYAHSQSLDRLMNPLIDQYLWGLQSTTTGTTLNAGTATTNFTKLRPTNFSNFKKNWLPGPSIKQQGFSKTANQNYIIPATGSDSLIYYETHSTLDGRWSALTPGPPRATAGPADSKFSNSQLIFAGPKQNGNTATVPGTLIFTSEEELAATNATDTDMWGNLPWIDNSRSNLPTVDRPTSLGAVPGMVWQNKNIYYQGPIWAKIPHTDGHFHPSPLIGGFGLKHPPPQIFIKNTPVPANPATTFTSTPVNSFITQYSTGQVSVQIDWEIQKERSKRWNPEVQFTSNYGQQNSLLWAPDAAGKYTEPRAIGTRYLTHHL

SEQ ID NO: 1134 - protein, 735 aa, Artificial Sequence
  Description of Artificial Sequence: Synthetic polypeptide
MAADGYLPDWLEDNLSEGVREWWALQPGAPKPKANQQHQDNARGLVLPGYKYLGPGNGLDKGEPVNAADAAALEHDKAYDQQLKAGDNPYLKYNHADAEFQQRLQGDTSFGGNLGRAVFQAKKRVLEPLGLVEQAGETAPGKKRPLIESPQQPDSSTGIGKKGKQPAKKKLVFEDETGAGDGPPEGSTSGAMSDDSEMRAAAGGAAVEGGQGADGVGNASGDWHCDSTWSEGHVTTTSTRTWVLPTYNNHLYKRLGESLQSNTYNGFSTPWGYFDFNRFHCHFSPRDWQRLINNNWGMRPKAMRVKIFNIQVKEVTTSNGETTVANNLTSTVQIFADSSYELPYVMDAGQEGSLPPFPNDVFMVPQYGYCGLVTGNTSQQQTDRNAFYCLEYFPSQMLRTGNNFEITYSFEKVPFHSMYAHSQSLDRLMNPLIDQYLWGLQSTTTGTTLNAGTATTNFTKLRPTNFSNFKKNWLPGPSIKQQGFSKTANQNYGIPATGSDSLIIYETHSTLDGRWSALTPGPPRATAGPADSKFSNSQLIFAGPKQNGNTATVPGTLIFTSEEELAATNATDTDMWGNLPGGDQSNSNLPTVDRLTALGAVPGMVWQNRDIYYQGPIWAKIPHTDGHFHPSPLIGGFGLKHPPPQIFIKNTPVPANPATTFSSTPVNSFITQYSTGQVSVQIDWEIQKERSKRWNPEVQFTSNYGQQNSLLWAPDAAGKYTEPRAIGTRYLTHHL

SEQ ID NO: 1135 - protein, 735 aa, Artificial Sequence
  Description of Artificial Sequence: Synthetic polypeptide
MAADGYLPDWLEDNLSEGVREWWALQPGAPKPKANQQHQDNARGLVLPGYKYLGPGNGLDKGEPVNAADAAALEHDKAYDQQLKAGDNPYLKYNHADAEFQQRLQGDTSFGGNLGRAVFQAKKRVLEPLGLVEQAGETAPGKKRPLIESPQQPDSSTGIGKKGKQPAKKKLVFEDETGAGDGPPEGSTSGAMSDDSEMRAAAGGAAVEGGQGADGVGNASGDWHCDSTWSEGHVTTTSTRTWVLPTYNNHLYKRLGESLQSNTYNGFSTPWGYFDFNRFHCHFSPRDWQRLINNNWGMRPKAMRVKIFNIQVKEVTTSNGETTVANNLTSTVQIFADSSYELPYVMDAGQEGSLPPFPNDVFMVPQYGYCGLVTGNTSQQQTDRNAFYCLEYFPSQMLRTGNNFEITYSFEKVPFHSMYAHSQSLDRLMNPLIDQYLWGLQSTTTGTTLNAGTATTNFTKLRPTNFSNFKKNWLPGPSIKQQGFSKTANQNYVIPATESDSLIYYETHSTLDGRWSALTPGPPYATAGPADSKFSNSQLIFAGPKQNGNTATVPGTLIFTSEEELAATNATDTDMWGNLPPRDDSTSNLPTVDRKTYLGAVPGMVWQNRDIYYQGPIWAKIPHTDGHFHPSPLIGGFGLKHPPPQIFIKNTPVPANPATTFSSTPVNSFITQYSTGQVSVQIDWEIQKERSKRWNPEVQFTSNYGQQNSLLWAPDAAGKYTEPRAIGTRYLTHHL

SEQ ID NO: 1136 - protein, 735 aa, Artificial Sequence
  Description of Artificial Sequence: Synthetic polypeptide
MAADGYLPDWLEDNLSEGVREWWALQPGAPKPKANQQHQDNARGLVLPGYKYLGPGNGLDKGEPVNAADAAALEHDKAYDQQLKAGDNPYLKYNHADAEFQQRLQGDTSFGGNLGRAVFQAKKRVLEPLGLVEQAGETAPGKKRPLIESPQQPDSSTGIGKKGKQPAKKKLVFEDETGAGDGPPEGSTSGAMSDDSEMRAAAGGAAVEGGQGADGVGNASGDWHCDSTWSEGHVTTTSTRTWVLPTYNNHLYKRLGESLQSNTYNGFSTPWGYFDFNRFHCHFSPRDWQRLINNNWGMRPKAMRVKIFNIQVKEVTTSNGETTVANNLTSTVQIFADSSYELPYVMDAGQEGSLPPFPNDVFMVPQYGYCGLVTGNTSQQQTDRNAFYCLEYFPSQMLRTGNNFEITYSFEKVPFHSMYAHSQSLDRLMNPLIDQYLWGLQSTTTGTTLNAGTATTNFTKLRPTNFSNFKKNWLPGPSIKQQGFSKTANQNYYIPATGSDSLIIYETHSTLDGRWSALTPGPPIATAGPADSKFSNSQLIFAGPKQNGNTATVPGTLIFTSEEELAATNSTDTDMWGNLPTDDDSRSNLPTVDRMTLLGAVPGMVWQNRDIYYQGPIWAKIPHTDGHFHPSPLIGGFGLKHPPPQIFIKNTPVPANPATTFSSTPVNSFITQYSTGQVSVQIDWEIQKERSKRWNPEVQFTSNYGQQNSLLWAPDAAGKYTEPRAIGTRYLTHHL

SEQ ID NO: 1137 - protein, 735 aa, Artificial Sequence
  Description of Artificial Sequence: Synthetic polypeptide
MAADGYLPDWLEDNLSEGVREWWALQPGAPKPKANQQHQDNARGLVLPGYKYLGPGNGLDKGEPVNAADAAALEHDKAYDQQLKAGDNPYLKYNHADAEFQQRLQGDTSFGGNLGRAVFQAKKRVLEPLGLVEQAGETAPGKKRPLIESPQQPDSSTGIGKKGKQPAKKKLVFEDETGAGDGPPEGSTSGAMSDDSEMRAAAGGAAVEGGQGADGVGNASGDWHCDSTWSEGHVTTTSTRTWVLPTYNNHLYKRLGESLQSNTYNGFSTPWGYFDFNRFHCHFSPRDWQRLINNNWGMRPKAMRVKIFNIQVKEVTTSNGETTVANNLTSTVQIFADSSYELPYVMDAGQEGSLPPFPNDVFMVPQYGYCGLVTGNTSQQQTDRNAFYCLEYFPSQMLRTGNNFEITYSFEKVPFHSMYAHSQSLDRLMNPLIDQYLWGLQSTTTGTTLNAGTATTNFTKLRPTNFSNFKKNWLPGPSIKQQGFSKTANQNYHIPATGSDSLIYYETHSTLDGRWSALTPGPPSATAGPADSKFSNSQLIFAGPKQNGNTATVPGTLIFTSEEELAATNATDTDMWGNLPRRDSSVSNLPTVDRYTDLGAVPGMVWQNRDIYYQGPIWAKIPHTDGHFHPSPLIGGFGLKHPPPQIFIKNTPVPANPATTFSSTPVNSFITQYSTGQVSVQIDWEIQKERSKRWNPEVQFTSNYGQQNSLLWAPDAAGKYTEPRAIGTRYLTHHL

SEQ ID NO: 1138 - protein, 735 aa, Artificial Sequence
  Description of Artificial Sequence: Synthetic polypeptide
MAADGYLPDWLEDNLSEGVREWWALQPGAPKPKANQQHQDNARGLVLPGYKYLGPGNGLDKGEPVNAADAAALEHDKAYDQQLKAGDNPYLKYNHADAEFQQRLQGDTSFGGNLGRAVFQAKKRVLEPLGLVEQAGETAPGKKRPLIESPQQPDSSTGIGKKGKQPAKKKLVFEDETGAGDGPPEGSTSGAMSDDSEMRAAAGGAAVEGGQGADGVGNASGDWHCDSTWSEGHVTTTSTRTWVLPTYNNHLYKRLGESLQSNTYNGFSTPWGYFDFNRFHCHFSPRDWQRLINNNWGMRPKAMRVKIFNIQVKEVTTSNGETTVANNLTSTVQIFADSSYELPYVMDAGQEGSLPPFPNDVFMVPQYGYCGLVTGNTSQQQTDRNAFYCLEYFPSQMLRTGNNFEITYSFEKVPFHSMYAHSQSLDRLMNPLIDQYLWGLQSTTTGTTLNAGTATTNFTKLRPTNFSNFKKNWLPGPSIKQQGFSKTANQNYSIPATGSDSLISYETHSTLDGRWSALTPGPPRATAGPADSKFSNSQLIFAGPKQNGNTATVPGTLIFTSEEELAATNATDTDMWGNLPRHDSSLSNLPTVDRNTGLGAVPGMVWQNRDIYYQGPIWAKIPHTDGHFHPSPLIGGFGLKHPPPQIFIKNTPVPANPATTFSSTPVNSFITQYSTGQVSVQIDWEIQKERSKRWNPEVQFTSNYGQQNSLLWAPDAAGKYTEPRAIGTRYLTHHL

SEQ ID NO: 1139 - protein, 735 aa, Artificial Sequence
  Description of Artificial Sequence: Synthetic polypeptide
MAADGYLPDWLEDNLSEGVREWWALQPGAPKPKANQQHQDNARGLVLPGYKYLGPGNGLDKGEPVNAADAAALEHDKAYDQQLKAGDNPYLKYNHADAEFQQRLQGDTSFGGNLGRAVFQAKKRVLEPLGLVEQAGETAPGKKRPLIESPQQPDSSTGIGKKGKQPAKKKLVFEDETGAGDGPPEGSTSGAMSDDSEMRAAAGGAAVEGGQGADGVGNASGDWHCDSTWSEGHVTTTSTRTWVLPTYNNHLYKRLGESLQSNTYNGFSTPWGYFDFNRFHCHFSPRDWQRLINNNWGMRPKAMRVKIFNIQVKEVTTSNGETTVANNLTSTVQIFADSSYELPYVMDAGQEGSLPPFPNDVFMVPQYGYCGLVTGNTSQQQTDRNAFYCLEYFPSQMLRTGNNFEITYSFEKVPFHSMYAHSQSLDRLMNPLIDQYLWGLQSTTTGTTLNAGTATTNFTKLRPTNFSNFKKNWLPGPSIKQQGFSKTANQNYFIPATGSDSLIRYETHSTLDGRWSALTPGPPLATAGPADSKFSNSQLIFAGPKQNGNTATVPGTLIFTSEEELAATNATDTDMWGNLPVIDFSKSNLPTVDRLTHLGAVPGMVWQNRDIYYQGPIWAKIPHTDGHFHPSPLIGGFGLKHPPPQIFIKNTPVPANPATTFSSTPVNSFITQYSTGQVSVQIDWEIQKERSKRWNPEVQFTSNYGQQNSLLWAPDAAGKYTEPRAIGTRYLTHHL

SEQ ID NO: 1140 - protein, 735 aa, Artificial Sequence
  Description of Artificial Sequence: Synthetic polypeptide
MAADGYLPDWLEDNLSEGVREWWALQPGAPKPKANQQHQDNARGLVLPGYKYLGPGNGLDKGEPVNAADAAALEHDKAYDQQLKAGDNPYLKYNHADAEFQQRLQGDTSFGGNLGRAVFQAKKRVLEPLGLVEQAGETAPGKKRPLIESPQQPDSSTGIGKKGKQPAKKKLVFEDETGAGDGPPEGSTSGAMSDDSEMRAAAGGAAVEGGQGADGVGNASGDWHCDSTWSEGHVTTTSTRTWVLPTYNNHLYKRLGESLQSNTYNGFSTPWGYFDFNRFHCHFSPRDWQRLINNNWGMRPKAMRVKIFNIQVKEVTTSNGETTVANNLTSTVQIFADSSYELPYVMDAGQEGSLPPFPNDVFMVPQYGYCGLVTGNTSQQQTDRNAFYCLEYFPSQMLRTGNNFEITYSFEKVPFHSMYAHSQSLDRLMNPLIDQYLWGLQSTTTGTTLNAGTATTNFTKLRPTNFSNFKKNWLPGPSIKQQGFSKTANQNYKIPATGSDSLIKYETHSTLDGRWSALTPGPPMATAGPADSKFSNSQLIFAGPKQNGNTATVPGTLIFTSEEELAATNATDTDMWGNLPVRDFSLSNLPTVDRTTKLGAVPGMVWQNRDIYYQGPIWAKIPHTDGHFHPSPLIGGFGLKHPPPQIFIKNTPVPANPATTFSSTPVNSFITQYSTGQVSVQIDWEIQKERSKRWNPEVQFTSNYGQQNSLLWAPDAAGKYTEPRAIGTRYLTHHL

SEQ ID NO: 1141 - protein, 735 aa, Artificial Sequence
  Description of Artificial Sequence: Synthetic polypeptide
MAADGYLPDWLEDNLSEGVREWWALQPGAPKPKANQQHQDNARGLVLPGYKYLGPGNGLDKGEPVNAADAAALEHDKAYDQQLKAGDNPYLKYNHADAEFQQRLQGDTSFGGNLGRAVFQAKKRVLEPLGLVEQAGETAPGKKRPLIESPQQPDSSTGIGKKGKQPAKKKLVFEDETGAGDGPPEGSTSGAMSDDSEMRAAAGGAAVEGGQGADGVGNASGDWHCDSTWSEGHVTTTSTRTWVLPTYNNHLYKRLGESLQSNTYNGFSTPWGYFDFNRFHCHFSPRDWQRLINNNWGMRPKAMRVKIFNIQVKEVTTSNGETTVANNLTSTVQIFADSSYELPYVMDAGQEGSLPPFPNDVFMVPQYGYCGLVTGNTSQQQTDRNAFYCLEYFPSQMLRTGNNFEITYSFEKVPFHSMYAHSQSLDRLMNPLIDQYLWGLQSTTTGTTLNAGTATTNFTKLRPTNFSNFKKNWLPGPSIKQQGFSKTANQNYFIPATGSDSLIQYETHSTLDGRWSALTPGPPMATAGPADSKFSNSQLIFAGPKQNGNTATVPGTLIFTSEEELAATNATDTDMWGNLPGGDQSNSNLPTVDRLTALGAVPGMVWQNRDIYYQGPIWAKIPHTDGHFHPSPLIGGFGLKHPPPQIFIKNTPVPANPATTFSSTPVNSFITQYSTGQVSVQIDWEIQKERSKRWNPEVQFTSNYGQQNSLLWAPDAAGKYTEPRAIGTRYLTHHL

SEQ ID NO: 1142 - protein, 735 aa, Artificial Sequence
  Description of Artificial Sequence: Synthetic polypeptide
MAADGYLPDWLEDNLSEGVREWWALQPGAPKPKANQQHQDNARGLVLPGYKYLGPGNGLDKGEPVNAADAAALEHDKAYDQQLKAGDNPYLKYNHADAEFQQRLQGDTSFGGNLGRAVFQAKKRVLEPLGLVEQAGETAPGKKRPLIESPQQPDSSTGIGKKGKQPAKKKLVFEDETGAGDGPPEGSTSGAMSDDSEMRAAAGGAAVEGGQGADGVGNASGDWHCDSTWSEGHVTTTSTRTWVLPTYNNHLYKRLGESLQSNTYNGFSTPWGYFDFNRFHCHFSPRDWQRLINNNWGMRPKAMRVKIFNIQVKEVTTSNGETTVANNLTSTVQIFADSSYELPYVMDAGQEGSLPPFPNDVFMVPQYGYCGLVTGNTSQQQTDRNAFYCLEYFPSQMLRTGNNFEITYSFEKVPFHSMYAHSQSLDRLMNPLIDQYLWGLQSTTTGTTLNAGTATTNFTKLRPTNFSNFKKNWLPGPSIKQQGFSKTANQNYEMPATGSDSLIIYETHSTLDGRWSALTPGPPFATAGPADSKFSNSQLIFAGPKQNGNTATVPGTLIFTSEEELAATNATDTDVWGNLPSGDHSQSNLPTVDRPTMLGAVPGMVWQNRDIYYQGPIWAKIPHTDGHFHPSPLIGGFGLKHPPPQIFIKNTPVPANPATTFISTPVNSFITQYSTGQVSVHIDWEIQKERSKRWNPEVQFTSDYGQHSSLLWAPDAAGKYTEPTAIGTRYLTHHL

SEQ ID NO: 1143 - protein, 734 aa, Artificial Sequence
  Description of Artificial Sequence: Synthetic polypeptide
MAADGYLPDWLEDNLSEGVREWWALQPGAPKPKANQQHQDNARGLVLPGYKYLGPGNGLDKGEPVNAADAAALEHDKAYDQQLKAGDNPYLKYNHADAEFQQRLQGDTSFGGNLGRAVFQAKKRVLEPLGLVEQAGETAPGKKRPLIESPQQPDSSTGIGKKGKQPAKKKLVFEDETGAGDGPPEGSTSGAMSDDSEMRAAAGGAAVEGGQGADGVGNASGDWHCDSTWSEGHVTTTSTRTWVLPTYNNHLYKRLGESLQSNTYNGFSTPWGYFDFNRFHCHFSPRDWQRLINNNWGMRPKAMRVKIFNIQVKEVTTSNGETTVANNLTSTVQIFADSSYELPYVMDAGQEGSLPPFPNDVFMVPQYGYCGLVTGNTSQQQTDRNAFYCLEYFPSQMLRTGNNFEITYSFEKVPFHSMYAHSQSLDRLMNPLIDQYLWGLQSTTTGTTLNAGTATTNFTKLRPTNFSNFKKNWLPGPSIKQQGFSKTANQNDIPATGSDSLIKYETHSTLDGRWSALTPGPPMATAGPADSKFSNSQLIFAGPKQNGNTATVPGTLIFTSEEELAATNATDTDMWGNLPGGDQSNSNLPTVDRLTALGAVPGMVWQNRDIYYQGPIWAKIPHTDGHFHPSPLIGGFGLKHPPPQIFIKNTPVPANPATTFSSTPVNSFITQYSTGQVSVQIDWEIQKERSKRWNPEVQFTSNYGQQNSLLWAPDAAGKYTEPRAIGTRYLTHHL

SEQ ID NO: 1144 - protein, 735 aa, Artificial Sequence
  Description of Artificial Sequence: Synthetic polypeptide
MAADGYLPDWLEDNLSEGVREWWALQPGAPKPKANQQHQDNARGLVLPGYKYLGPGNGLDKGEPVNAADAAALEHDKAYDQQLKAGDNPYLKYNHADAEFQQRLQGDTSFGGNLGRAVFQAKKRVLEPLGLVEQAGETAPGKKRPLIESPQQPDSSTGIGKKGKQPAKKKLVFEDETGAGDGPPEGSTSGAMSDDSEMRAAAGGAAVEGGQGADGVGNASGDWHCDSTWSEGHVTTTSTRTWVLPTYNNHLYKRLGESLQSNTYNGFSTPWGYFDFNRFHCHFSPRDWQRLINNNWGMRPKAMRVKIFNIQVKEVTTSNGETTVANNLTSTVQIFADSSYELPYVMDAGQEGSLPPFPNDVFMVPQYGYCGLVTGNTSQQQTDRNAFYCLEYFPSQMLRTGNNFEITYSFEKVPFHSMYAHSQSLDRLMNPLIDQYLWGLQSTTTGTTLNAGTATTNFTKLRPTNFSNFKKNWLPGPSIKQQGFSKTANQNYIIPATGSDSLITYETHSTLDGRWSALTPGPPVATAGPADSKFSNSQLIFAGPKQNGNTATVPGTLIFTSEEELAATNATDTDMWGNLPFNDDSSSNLPTVDRSTFLGAVPGMVWQNRDIYYQGPIWAKIPHTDGHFHPSPLIGGFGLKHPPPQIFIKNTPVPANPATTFSSTPVNSFITQYSTGQVSVQIDWEIQKERSKRWNPEVQFTSNYGQQNSLLWAPDAAGKYTEPRAIGTRYLTHHL

SEQ ID NO: 1145 - protein, 733 aa, Artificial Sequence
  Description of Artificial Sequence: Synthetic polypeptide
MAADGYLPDWLEDNLSEGIREWWDLKPGAPKPKANQQKQDDGRGLVLPGYKYLGPFNGLDKGEPVNAADAAALEHDKAYDQQLKAGDNPYLRYNHADAEFQERLQEDTSFGGNLGRAVFQAKKRVLEPLGLVEEGAKTAPGKKRPLESPQEPDSSSGIGKKGKQPARKRLNFEEDTGAGDGPPEGSDTSAMSSDIEMRAAPGGNAVDAGQGSDGVGNASGDWHCDSTWSEGKVTTTSTRTWVLPTYNNHLYLRLGTTSSSNTYNGFSTPWGYFDFNRFHCHFSPRDWQRLINNNWGLRPKAMRVKIFNIQVKEVTTSNGETTVANNLTSTVQIFADSSYELPYVMDAGQEGSLPPFPNDVFMVPQYGYCGIVTGENQNQTDRNAFYCLEYFPSQMLRTGNNFEMAYNFEKVPFHSMYAHSQSLDRLMNPLLDQYLWHLQSTTSGETLNQGNAATTFGKIRSGDFAFYRKNWLPGPCVKQQRFSKTASQNYKIPASGGNALLKYDTHYTLNNRWSNIAPGPPMATAGPSDGDFSNAQLIFPGPSVTGNTTTSANNLLFTSEEEIAATNPRDTDMFGQIADNNQNATTAPITGNVTAMGVLPGMVWQNRDIYYQGPIWAKIPHADGHFHPSPLIGGFGLKHPPPQIFIKNTPVPANPATTFTAARVDSFITQYSTGQVAVQIEWEIEKERSKRWNPEVQFTSNYGNQSSMLWAPDTTGKYTEPRVIGSRYLTNHL

SEQ ID NO: 1146 - protein, 742 aa, Artificial Sequence; identical to SEQ ID NO: 957
  Description of Artificial Sequence: Synthetic polypeptide

SEQ ID NO: 1147 - protein, 733 aa, Artificial Sequence; identical to SEQ ID NO: 430
  Description of Artificial Sequence: Synthetic polypeptide

SEQ ID NO: 1148 - protein, 733 aa, Artificial Sequence; identical to SEQ ID NO: 147
  Description of Artificial Sequence: Synthetic polypeptide

SEQ ID NO: 1149 - protein, 733 aa, Artificial Sequence; identical to SEQ ID NO: 434
  Description of Artificial Sequence: Synthetic polypeptide

SEQ ID NO: 1150 - protein, 735 aa, Artificial Sequence
  Description of Artificial Sequence: Synthetic polypeptide
MAADGYLPDWLEDNLSEGVREWWALQPGAPKPKANQQHQDNARGLVLPGYKYLGPGNGLDKGEPVNAADAAALEHDKAYDQQLKAGDNPYLKYNHADAEFQQRLQGDTSFGGNLGRAVFQAKKRVLEPLGLVEQAGETAPGKKRPLIESPQQPDSSTGIGKKGKQPAKKKLVFEDETGAGDGPPEGSTSGAMSDDSEMRAAAGGAAVEGGQGADGVGNASGDWHCDSTWSEGHVTTTSTRTWVLPTYNNHLYKRLGESLQSNTYNGFSTPWGYFDFNRFHCHFSPRDWQRLINNNWGMRPKAMRVKIFNIQVKEVTTSNGETTVANNLTSTVQIFADSSYELPYVMDAGQEGSLPPFPNDVFMVPQYGYCGLVTGNTSQQQTDRNAFYCLEYFPSQMLRTGNNFEITYSFEKVPFHSMYAHSQSLDRLMNPLIDQYLWGLQSTTTGTTLNAGTATTNFTKLRPTNFSNFKKNWLPGPSIKQQGFSKTANQNYEIPATGSDSLIEYETHSTLDGRWSALTPGPPMATAGPADSKFSNSQLIFAGPKQNGNTATVPGTLIFTSEEELAATNATDTDMWGNLPGGDQSSSNLPTVDRLTALGAVPGMVWQNRDIYYQGPIWAKIPHTDGHFHPSPLIGGFGLKHPPPQIFIKNTPVPANPATTFSSTPVNSFITQYSTGQVSVQIDWEIQKERSKRWNPEVQFTSNYGQQNSLLWAPDAAGKYTEPRAIGTRYLTHHL

SEQ ID NO: 1151 - protein, 735 aa, Artificial Sequence
  Description of Artificial Sequence: Synthetic polypeptide
MAADGYLPDWLEDNLSEGVREWWALQPGAPKPKANQQHQDNARGLVLPGYKYLGPGNGLDKGEPVNAADAAALEHDKAYDQQLKAGDNPYLKYNHADAEFQQRLQGDTSFGGNLGRAVFQAKKRVLEPLGLVEQAGETAPGKKRPLIESPQQPDSSTGIGKKGKQPAKKKLVFEDETGAGDGPPEGSTSGAMSDDSEMRAAAGGAAVEGGQGADGVGNASGDWHCDSTWSEGHVTTTSTRTWVLPTYNNHLYKRLGESLQSNTYNGFSTPWGYFDFNRFHCHFSPRDWQRLINNNWGMRPKAMRVKIFNIQVKEVTTSNGETTVANNLTSTVQIFADSSYELPYVMDAGQEGSLPPFPNDVFMVPQYGYCGLVTGNTSQQQTDRNAFYCLEYFPSQMLRTGNNFEITYSFEKVPFHSMYAHSQSLDRLMNPLIDQYLWGLQSTTTGTTLNAGTATTNFTKLRPTNFSNFKKNWLPGPSIKQQGFSKTANQNYEIPATGSDSLIEYETHSTLDGRWSALTPGPPMATAGPADSKFSNSQLIFAGPKQNGNTATVPGTLIFTSEEELAATNATDTDMWGNLPGGDQSSSNLPVVRGLRALGAVPGMVWQNRDIYYQGPIWAKIPHTDGHFHPSPLIGGFGLKHPPPQIFIKNTPVPANPATTFSSTPVNSFITQYSTGQVSVQIDWEIQKERSKRWNPEVQFTSNYGQQNSLLWAPDAAGKYTEPRAIGTRYLTHHL

SEQ ID NO: 1152 - protein, 735 aa, Artificial Sequence
  Description of Artificial Sequence: Synthetic polypeptide
MAADGYLPDWLEDNLSEGVREWWALQPGAPKPKANQQHQDNARGLVLPGYKYLGPGNGLDKGEPVNAADAAALEHDKAYDQQLKAGDNPYLKYNHADAEFQQRLQGDTSFGGNLGRAVFQAKKRVLEPLGLVEQAGETAPGKKRPLIESPQQPDSSTGIGKKGKQPAKKKLVFEDETGAGDGPPEGSTSGAMSDDSEMRAAAGGAAVEGGQGADGVGNASGDWHCDSTWSEGHVTTTSTRTWVLPTYNNHLYKRLGESLQSNTYNGFSTPWGYFDFNRFHCHFSPRDWQRLINNNWGMRPKAMRVKIFNIQVKEVTTSNGETTVANNLTSTVQIFADSSYELPYVMDAGQEGSLPPFPNDVFMVPQYGYCGLVTGNTSQQQTDRNAFYCLEYFPSQMLRTGNNFEITYSFEKVPFHSMYAHSQSLDRLMNPLIDQYLWGLQSTTTGTTLNAGTATTNFTKLRPTNFSNFKKNWLPGPSIKQQGFSKTANQNYEIPATGSDSLIEYETHSTLDGRWSALTPGPPMATAGPADSKFSNSQLIFAGPKQNGNTATVPGTLIFTSEEELAATNATDTDMWGNLPGGDQSSSNLPVVNRLSALGAVPGMVWQNRDIYYQGPIWAKIPHTDGHFHPSPLIGGFGLKHPPPQIFIKNTPVPANPATTFSSTPVNSFITQYSTGQVSVQIDWEIQKERSKRWNPEVQFTSNYGQQNSLLWAPDAAGKYTEPRAIGTRYLTHHL

SEQ ID NO: 1153 - protein, 735 aa, Artificial Sequence
  Description of Artificial Sequence: Synthetic polypeptide
MAADGYLPDWLEDNLSEGVREWWALQPGAPKPKANQQHQDNARGLVLPGYKYLGPGNGLDKGEPVNAADAAALEHDKAYDQQLKAGDNPYLKYNHADAEFQQRLQGDTSFGGNLGRAVFQAKKRVLEPLGLVEQAGETAPGKKRPLIESPQQPDSSTGIGKKGKQPAKKKLVFEDETGAGDGPPEGSTSGAMSDDSEMRAAAGGAAVEGGQGADGVGNASGDWHCDSTWSEGHVTTTSTRTWVLPTYNNHLYKRLGESLQSNTYNGFSTPWGYFDFNRFHCHFSPRDWQRLINNNWGMRPKAMRVKIFNIQVKEVTTSNGETTVANNLTSTVQIFADSSYELPYVMDAGQEGSLPPFPNDVFMVPQYGYCGLVTGNTSQQQTDRNAFYCLEYFPSQMLRTGNNFEITYSFEKVPFHSMYAHSQSLDRLMNPLIDQYLWGLQSTTTGTTLNAGTATTNFTKLRPTNFSNFKKNWLPGPSIKQQGFSKTANQNYEIPATGSDSLIEYETHSTLDGRWSALTPGPPMATAGPADSKFSNSQLIFAGPKQNGNTATVPGTLIFTSEEELAATNATDTDMWGNLPGGDQSSSNLPPVMGLGALGAVPGMVWQNRDIYYQGPIWAKIPHTDGHFHPSPLIGGFGLKHPPPQIFIKNTPVPANPATTFSSTPVNSFITQYSTGQVSVQIDWEIQKERSKRWNPEVQFTSNYGQQNSLLWAPDAAGKYTEPRAIGTRYLTHHL

SEQ ID NO: 1154 - protein, 736 aa, Artificial Sequence
  Description of Artificial Sequence: Synthetic polypeptide
MAADGYLPDWLEDNLSEGVREWWALQPGAPKPKANQQHQDNARGLVLPGYKYLGPGNGLDKGEPVNAADAAALEHDKAYDQQLKAGDNPYLKYNHADAEFQQRLQGDTSFGGNLGRAVFQAKKRVLEPLGLVEQAGETAPGKKRPLIESPQQPDSSTGIGKKGKQPAKKKLVFEDETGAGDGPPEGSTSGAMSDDSEMRAAAGGAAVEGGQGADGVGNASGDWHCDSTWSEGHVTTTSTRTWVLPTYNNHLYKRLGESLQSNTYNGFSTPWGYFDFNRFHCHFSPRDWQRLINNNWGMRPKAMRVKIFNIQVKEVTTSNGETTVANNLTSTVQIFADSSYELPYVMDAGQEGSLPPFPNDVFMVPQYGYCGLVTGNTSQQQTDRNAFYCLEYFPSQMLRTGNNFEITYSFEKVPFHSMYAHSQSLDRLMNPLIDQYLWGLQSTTTGTTLNAGTATTNFTKLRPTNFSNFKKNWLPGPSIKQQGFSKTANQNYEIPATGSDSLIEYETHSTLDGRWSALTPGPPMATAGPADSKFSNSQLIFAGPKQNGNTATVPGTLIFTSEEELAATNATDTDMWGNLPGGDQSRVDRLPTVDRLTALGAVPGMVWQNRDIYYQGPIWAKIPHTDGHFHPSPLIGGFGLKHPPPQIFIKNTPVPANPATTFSSTPVNSFITQYSTGQVSVQIDWEIQKERSKRWNPEVQFTSNYGQQNSLLWAPDAAGKYTEPRAIGTRYLTHHL

SEQ ID NO: 1155 - protein, 736 aa, Artificial Sequence
  Description of Artificial Sequence: Synthetic polypeptide
MAADGYLPDWLEDNLSEGVREWWALQPGAPKPKANQQHQDNARGLVLPGYKYLGPGNGLDKGEPVNAADAAALEHDKAYDQQLKAGDNPYLKYNHADAEFQQRLQGDTSFGGNLGRAVFQAKKRVLEPLGLVEQAGETAPGKKRPLIESPQQPDSSTGIGKKGKQPAKKKLVFEDETGAGDGPPEGSTSGAMSDDSEMRAAAGGAAVEGGQGADGVGNASGDWHCDSTWSEGHVTTTSTRTWVLPTYNNHLYKRLGESLQSNTYNGFSTPWGYFDFNRFHCHFSPRDWQRLINNNWGMRPKAMRVKIFNIQVKEVTTSNGETTVANNLTSTVQIFADSSYELPYVMDAGQEGSLPPFPNDVFMVPQYGYCGLVTGNTSQQQTDRNAFYCLEYFPSQMLRTGNNFEITYSFEKVPFHSMYAHSQSLDRLMNPLIDQYLWGLQSTTTGTTLNAGTATTNFTKLRPTNFSNFKKNWLPGPSIKQQGFSKTANQNYEIPATGSDSLIEYETHSTLDGRWSALTPGPPMATAGPADSKFSNSQLIFAGPKQNGNTATVPGTLIFTSEEELAATNATDTDMWGNLPGGDQSRALRLPTVDRLTALGAVPGMVWQNRDIYYQGPIWAKIPHTDGHFHPSPLIGGFGLKHPPPQIFIKNTPVPANPATTFSSTPVNSFITQYSTGQVSVQIDWEIQKERSKRWNPEVQFTSNYGQQNSLLWAPDAAGKYTEPRAIGTRYLTHHL

SEQ ID NO: 1156 - DNA, 1172 bp, Artificial Sequence
  Description of Artificial Sequence: Synthetic polynucleotide
cttaattaggctgcgcgctcgctcgctcactgaggccgcccgggcaaagcccgggcgtcgggcgacctttggtcgcccggcctcagtgagcgagcgagcgcgcagagagggagtggccaactccatcactaggggttccttgtagttaatgattaacccgccatgctacttatctaccagggtaatggggatcctctagaactatagctagtcgacattgattattgactagttattaatagtaatcaattacggggtcattagttcatagcccatatatggagttccgcgttacataacttacggtaaatggcccgcctggctgaccgcccaacgacccccgcccattgacgtcaataatgacgtatgttcccatagtaacgccaatagggactttccattgacgtcaatgggtggactatttacggtaaactgcccacttggcagtacatcaagtgtatcatatgccaagtacgccccctattgacgtcaatgacggtaaatggcccgcctggcattatgcccagtacatgaccttatgggactttcctacttggcagtacatctacgtattagtcatcgctattaccatgtcgaggccacgttctgcttcactctccccatctcccccccctccccacccccaattttgtatttatttattttttaattattttgtgcagcgatgggggcggggggggggggcgcgcgccaggcggggcggggcggggcgaggggcggggcggggcgaggcggagaggtgcggcggcagccaatcagagcggcgcgctccgaaagtttccttttatggcgaggcggcggcggcggcggccctataaaaagcgaagcgcgcggcgggcgggagcaagctttattgcggtagtttatcacagttaaattgctaacgcagtcagtgcttctgacacaacagtctcgaacttaagctgcagaagttggtcgtgaggcactgggcaggtaagtatcaaggttacaagacaggtttaaggagaccaatagaaactgggcttgtcgagacagagaagactcttgcgtttctgataggcacctattggtcttactgacatccactttgcctttctctccacaggtgtccactcccagttcaattacagctcttaaggctagagtacttaatacgactcsactatagg

SEQ ID NO: 1157 - DNA, 3231 bp, Artificial Sequence
  Description of Artificial Sequence: Synthetic polynucleotide
taagaattcacgcgtggtacctctagagtcgacccgggcggcctcgaggacggggtgaactacgcctgaggatccgatctttttccctctgccaaaaattatggggacatcatgaagccccttgagcatctgacttctggctaataaaggaaatttattttcattgcaatagtgtgttggaattttttgtgtctctcactcggaagcaattcgttgatctgaatttcgaccacccataatacccattaccctggtagataagtagcatggcgggttaatcattaactacaaggaacccctagtgatggagttggccactccctctctgcgcgctcgctcgctcactgaggccgggcgaccaaaggtcgcccgacgcccgggctttgcccgggcggcctcagtgagcgagcgagcgcgcagccttaattaacctaattcactggccgtcgttttacaacgtcgtgactgggaaaaccctggcgttacccaacttaatcgccttgcagcacatccccctttcgccagctggcgtaatagcgaagaggcccgcaccgatcgcccttcccaacagttgcgcagcctgaatggcgaatgggacgcgccctgtagcggcgcattaagcgcggcgggtgtggtggttacgcgcagcgtgaccgctacacttgccagcgccctagcgcccgctcctttcgctttcttcccttcctttctcgccacgttcgccggctttccccgtcaagctctaaatcgggggctccctttagggttccgatttagtgctttacggcacctcgaccccaaaaaacttgattagggtgatggttcacgtagtgggccatcgccctgatagacggtttttcgccctttgacgttggagtccacgttctttaatagtggactcttgttccaaactggaacaacactcaaccctatctcggtctattcttttgatttataagggattttgccgatttcggcctattggttaaaaaatgagctgatttaacaaaaatttaacgcgaattttaacaaaatattaacgcttacaatttaggtggcacttttcggggaaatgtgcgcggaacccctatttgtttatttttctaaatacattcaaatatgtatccgctcatgagacaataaccctgataaatgcttcaataatattgaaaaaggaagagtatgagtattcaacatttccgtgtcgcccttattcccttttttgcggcattttgccttcctgtttttgctcacccagaaacgctggtgaaagtaaaagatgctgaagatcagttgggtgcacgagtgggttacatcgaactggatctcaacagcggtaagatccttgagagttttcgccccgaagaacgttttccaatgatgagcacttttaaagttctgctatgtggcgcggtattatcccgtattgacgccgggcaagagcaactcggtcgccgcatacactattctcagaatgacttggttgagtactcaccagtcacagaaaagcatcttacggatggcatgacagtaagagaattatgcagtgctgccataaccatgagtgataacactgcggccaacttacttctgacaacgatcggaggaccgaaggagctaaccgcttttttgcacaacatgggggatcatgtaactcgccttgatcgttgggaaccggagctgaatgaagccataccaaacgacgagcgtgacaccacgatgcctgtagcaatggcaacaacgttgcgcaaactattaactggcgaactacttactctagcttcccggcaacaattaatagactggatggaggcggataaagttgcaggaccacttctgcgctcggcccttccggctggctggtttattgctgataaatctggagccggtgagcgtgggtctcgcggtatcattgcagcactggggccagatggtaagccctcccgtatcgtagttatctacacgacggggagtcaggcaactatggatgaacgaaatagacagatcgctgagataggtgcctcactgattaagcattggtaactgtcagaccaagtttactcatatatactttagattgatttaaaacttcatttttaatttaaaaggatctaggtgaagatcctttttgataatctcatgaccaaaatcccttaacgtgagttttcgttccactgagcgtcagaccccgtagaaaagatcaaaggatcttcttgagatcctttttttctgcgcgtaatctgctgcttgcaaacaaaaaaaccaccgctaccagcggtggtttgtttgccggatcaagagctaccaactctttttccgaaggtaactggcttcagcagagcgcagataccaaatactgttcttctagtgtagccgtagttaggccaccacttcaagaactctgtagcaccgcctacatacctcgctctgctaatcctgttaccagtggctgctgccagtggcgataagtcgtgtcttaccgggttggactcaagacgatagttaccggataaggcgcagcggtcgggctgaacggggggttcgtgcacacagcccagcttggagcgaacgacctacaccgaactgagatacctacagcgtgagctatgagaaagcgccacgcttcccgaagggagaaaggcggacaggtatccggtaagcggcagggtcggaacaggagagcgcacgagggagcttccagggggaaacgcctggtatctttatagtcctgtcgggtttcgccacctctgacttgagcgtcgatttttgtgatgctcgtcaggggggcggagcctatggaaaaacgccagcaacgcggcctttttacggttcctggccttttgctggccttttgctcacatgttctttcctgcgttatcccctgattctgtggataaccgtattaccgcctttgagtgagctgataccgctcgccgcagccgaacgaccgagcgcagcgagtcagtgagcgaggaagcggaagagcgcccaatacgcaaaccgcctctccccgcgcgttggccgattcattaatgcagctggcacgacaggtttcccgactggaaagcgggcagtgagcgcaacgcaattaatgtgagttagctcactcattaggcaccccaggctttacactttatgcttccggctcgtatgttgtgtggaattgtgagcggataacaatttcacacaggaaacagctatgaccatgattacgccagatttaattaaggc

SEQ ID NO: 1158 - protein, 737 aa, Artificial Sequence
  Description of Artificial Sequence: Synthetic polypeptide
  MOD_RES (264)..(264): Any amino acid
  MOD_RES (266)..(266): Any amino acid
  MOD_RES (268)..(268): Any amino acid
  MOD_RES (448)..(448): Any amino acid
  MOD_RES (459)..(460): Any amino acid
  MOD_RES (467)..(467): Any amino acid
  MOD_RES (470)..(471): Any amino acid
  MOD_RES (474)..(474): Any amino acid
  MOD_RES (495)..(495): Any amino acid
  MOD_RES (516)..(516): Any amino acid
  MOD_RES (533)..(533): Any amino acid
  MOD_RES (547)..(547): Any amino acid
  MOD_RES (551)..(551): Any amino acid
  MOD_RES (555)..(555): Any amino acid
  MOD_RES (557)..(557): Any amino acid
  MOD_RES (561)..(561): Any amino acid
  MOD_RES (563)..(563): Any amino acid
  MOD_RES (577)..(577): Any amino acid
  MOD_RES (583)..(583): Any amino acid
  MOD_RES (593)..(593): Any amino acid
  MOD_RES (596)..(596): Any amino acid
  MOD_RES (661)..(662): Any amino acid
  MOD_RES (664)..(665): Any amino acid
  MOD_RES (710)..(710): Any amino acid
  MOD_RES (717)..(719): Any amino acid
  MOD_RES (723)..(723): Any amino acid
MAADGYLPDWLEDNLSEGIREWWDLKPGAPKPKANQQKQDDGRGLVLPGYKYLGPFNGLDKGEPVNAADAAALEHDKAYDQQLKAGDNPYLRYNHADAEFQERLQEDTSFGGNLGRAVFQAKKRVLEPLGLVEEGAKTAPGKKRPVEPSPQRSPDSSTGIGKKGQQPAKKRLNFGQTGDSESVPDPQPLGEPPAGPSGLGSGTMAAGGGAPMADNNEGADGVGNASGNWHCDSTWLGDRVITTSTRTWALPTYNNHLYKQISSXSXGXTNDNHYFGYSTPWGYFDFNRFHCHFSPRDWQRLINNNWGFRPKRLNFKLFNIQVKEVTTNDGVTTIANNLTSTVQVFSDSEYQLPYVLGSAHQGCLPPFPADVFMIPQYGYLTLNNGSQAVGRSSFYCLEYFPSQMLRTGNNFTFSYTFEDVPFHSSYAHSQSLDRLMNPLIDQYLYYLXRTQSTGGTAGXXELLFSQXGPXXMSXQAKNWLPGPCYRQQRVSKTLXQNNNSNFAWTGATKYHLNGRXSLVNPGVAMATHKDDEXRFFPSSGVLIFGKXGAGXNNTXLXNVMXTXEEEIKTTNPVATEXYGVVAXNLQSSNTAPXTGXVNSQGALPGMVWQNRDVYLQGPIWAKIPHTDGNFHPSPLMGGFGLKHPPPQILIKNTPVPANPPXXFXXAKFASFITQYSTGQVSVEIEWELQKENSKRWNPEIQYTSNYAKSXNVDFAVXXXGVYXEPRPIGTRYLTRNL

SEQ ID NO: 1159 - protein, 737 aa, Artificial Sequence
  Description of Artificial Sequence: Synthetic polypeptide
MAADGYLPDWLEDNLSEGIREWWDLKPGAPKPKANQQKQDDGRGLVLPGYKYLGPFNGLDKGEPVNAADAAALEHDKAYDQQLKAGDNPYLRYNHADAEFQERLQEDTSFGGNLGRAVFQAKKRVLEPLGLVEEGAKTAPGKKRPVEPSPQRSPDSSTGIGKKGQQPAKKRLNFGQTGDSESVPDPQPLGEPPAGPSGLGSGTMAAGGGAPMADNNEGADGVGNASGNWHCDSTWLGDRVITTSTRTWALPTYNNHLYKQISSASSGSTNDNHYFGYSTPWGYFDFNRFHCHFSPRDWQRLINNNWGFRPKRLNFKLFNIQVKEVTTNDGVTTIANNLTSTVQVFSDSEYQLPYVLGSAHQGCLPPFPADVFMIPQYGYLTLNNGSQAVGRSSFYCLEYFPSQMLRTGNNFTFSYTFEDVPFHSSYAHSQSLDRLMNPLIDQYLYYLARTQSTGGTAGNRELLFSQGGPSNMSAQAKNWLPGPCYRQQRVSKTLAQNNNSNFAWTGATKYHLNGRDSLVNPGVAMATHKDDEDRFFPSSGVLIFGKEGAGANNTALENVMLTNEEEIKTTNPVATEQYGVVASNLQSSNTAPATGAVNSQGALPGMVWQNRDVYLQGPIWAKIPHTDGNFHPSPLMGGFGLKHPPPQILIKNTPVPANPPATFTPAKFASFITQYSTGQVSVEIEWELQKENSKRWNPEIQYTSNYAKSTNVDFAVNNEGVYSEPRPIGTRYLTRNL

SEQ ID NO: 1160 - protein, 737 aa, Artificial Sequence
  Description of Artificial Sequence: Synthetic polypeptide
MAADGYLPDWLEDNLSEGIREWWDLKPGAPKPKANQQKQDDGRGLVLPGYKYLGPFNGLDKGEPVNAADAAALEHDKAYDQQLKAGDNPYLRYNHADAEFQERLQEDTSFGGNLGRAVFQAKKRVLEPLGLVEEGAKTAPGKKRPVEPSPQRSPDSSTGIGKKGQQPAKKRLNFGQTGDSESVPDPQPLGEPPAGPSGLGSGTMAAGGGAPMADNNEGADGVGNASGNWHCDSTWLGDRVITTSTRTWALPTYNNHLYKQISSQSSGSTNDNHYFGYSTPWGYFDFNRFHCHFSPRDWQRLINNNWGFRPKRLNFKLFNIQVKEVTTNDGVTTIANNLTSTVQVFSDSEYQLPYVLGSAHQGCLPPFPADVFMIPQYGYLTLNNGSQAVGRSSFYCLEYFPSQMLRTGNNFTFSYTFEDVPFHSSYAHSQSLDRLMNPLIDQYLYYLSRTQSTGGTAGNRELLFSQGGPANMSAQAKNWLPGPCYRQQRVSKTLSQNNNSNFAWTGATKYHLNGRDSLVNPGVAMATHKDDEERFFPSSGVLIFGKQGAGANNTTLDNVMMTSEEEIKTTNPVATEQYGVVASNLQSSNTAPQTGTVNSQGALPGMVWQNRDVYLQGPIWAKIPHTDGNFHPSPLMGGFGLKHPPPQILIKNTPVPANPPAVFSPAKFASFITQYSTGQVSVEIEWELQKENSKRWNPEIQYTSNYAKSTNVDFAVNSEGVYSEPRPIGTRYLTRNL

SEQ ID NO: 1161 - protein, 737 aa, Artificial Sequence
  Description of Artificial Sequence: Synthetic polypeptide
MAADGYLPDWLEDNLSEGIREWWDLKPGAPKPKANQQKQDDGRGLVLPGYKYLGPFNGLDKGEPVNAADAAALEHDKAYDQQLKAGDNPYLRYNHADAEFQERLQEDTSFGGNLGRAVFQAKKRVLEPLGLVEEGAKTAPGKKRPVEPSPQRSPDSSTGIGKKGQQPAKKRLNFGQTGDSESVPDPQPLGEPPAGPSGLGSGTMAAGGGAPMADNNEGADGVGNASGNWHCDSTWLGDRVITTSTRTWALPTYNNHLYKQISSASSGSTNDNHYFGYSTPWGYFDFNRFHCHFSPRDWQRLINNNWGFRPKRLNFKLFNIQVKEVTTNDGVTTIANNLTSTVQVFSDSEYQLPYVLGSAHQGCLPPFPADVFMIPQYGYLTLNNGSQAVGRSSFYCLEYFPSQMLRTGNNFTFSYTFEDVPFHSSYAHSQSLDRLMNPLIDQYLYYLARTQSTGGTAGTRELLFSQGGPSNMSAQAKNWLPGPCYRQQRVSKTLTQNNNSNFAWTGATKYHLNGRDSLVNPGVAMATHKDDEDRFFPSSGVLIFGKQGAGANNTALDNVMITNEEEIKTTNPVATEQYGVVASNLQSSNTAPATGTVNSQGALPGMVWQNRDVYLQGPIWAKIPHTDGNFHPSPLMGGFGLKHPPPQILIKNTPVPANPPTVFSPAKFASFITQYSTGQVSVEIEWELQKENSKRWNPEIQYTSNYAKSTNVDFAVNSEGVYTEPRPIGTRYLTRNL

SEQ ID NO: 1162 - protein, 737 aa, Artificial Sequence
  Description of Artificial Sequence: Synthetic polypeptide
  MOD_RES (264)..(264): Any amino acid
  MOD_RES (448)..(448): Any amino acid
  MOD_RES (459)..(459): Any amino acid
  MOD_RES (470)..(470): Any amino acid
  MOD_RES (495)..(495): Any amino acid
  MOD_RES (533)..(533): Any amino acid
  MOD_RES (547)..(547): Any amino acid
  MOD_RES (555)..(555): Any amino acid
  MOD_RES (557)..(557): Any amino acid
  MOD_RES (561)..(561): Any amino acid
  MOD_RES (563)..(563): Any amino acid
  MOD_RES (593)..(593): Any amino acid
  MOD_RES (596)..(596): Any amino acid
  MOD_RES (661)..(662): Any amino acid
  MOD_RES (664)..(664): Any amino acid
  MOD_RES (718)..(718): Any amino acid
  MOD_RES (723)..(723): Any amino acid
MAADGYLPDWLEDNLSEGIREWWDLKPGAPKPKANQQKQDDGRGLVLPGYKYLGPFNGLDKGEPVNAADAAALEHDKAYDQQLKAGDNPYLRYNHADAEFQERLQEDTSFGGNLGRAVFQAKKRVLEPLGLVEEGAKTAPGKKRPVEPSPQRSPDSSTGIGKKGQQPAKKRLNFGQTGDSESVPDPQPLGEPPAGPSGLGSGTMAAGGGAPMADNNEGADGVGNASGNWHCDSTWLGDRVITTSTRTWALPTYNNHLYKQISSXSSGSTNDNHYFGYSTPWGYFDFNRFHCHFSPRDWQRLINNNWGFRPKRLNFKLFNIQVKEVTTNDGVTTIANNLTSTVQVFSDSEYQLPYVLGSAHQGCLPPFPADVFMIPQYGYLTLNNGSQAVGRSSFYCLEYFPSQMLRTGNNFTFSYTFEDVPFHSSYAHSQSLDRLMNPLIDQYLYYLXRTQSTGGTAGXRELLFSQGGPXNMSAQAKNWLPGPCYRQQRVSKTLXQNNNSNFAWTGATKYHLNGRDSLVNPGVAMATHKDDEXRFFPSSGVLIFGKXGAGANNTXLXNVMXTXEEEIKTTNPVATEQYGVVASNLQSSNTAPXTGXVNSQGALPGMVWQNRDVYLQGPIWAKIPHTDGNFHPSPLMGGFGLKHPPPQILIKNTPVPANPPXXFXPAKFASFITQYSTGQVSVEIEWELQKENSKRWNPEIQYTSNYAKSTNVDFAVNXEGVYXEPRPIGTRYLTRNL

SEQ ID NO: 1163 - protein, 737 aa, Artificial Sequence
  Description of Artificial Sequence: Synthetic polypeptide
  MOD_RES (264)..(264): Any amino acid
  MOD_RES (448)..(448): Any amino acid
  MOD_RES (470)..(470): Any amino acid
  MOD_RES (533)..(533): Any amino acid
  MOD_RES (547)..(547): Any amino acid
  MOD_RES (555)..(555): Any amino acid
  MOD_RES (557)..(557): Any amino acid
  MOD_RES (561)..(561): Any amino acid
  MOD_RES (563)..(563): Any amino acid
  MOD_RES (593)..(593): Any amino acid
  MOD_RES (596)..(596): Any amino acid
  MOD_RES (662)..(662): Any amino acid
  MOD_RES (664)..(664): Any amino acid
  MOD_RES (718)..(718): Any amino acid
MAADGYLPDWLEDNLSEGIREWWDLKPGAPKPKANQQKQDDGRGLVLPGYKYLGPFNGLDKGEPVNAADAAALEHDKAYDQQLKAGDNPYLRYNHADAEFQERLQEDTSFGGNLGRAVFQAKKRVLEPLGLVEEGAKTAPGKKRPVEPSPQRSPDSSTGIGKKGQQPAKKRLNFGQTGDSESVPDPQPLGEPPAGPSGLGSGTMAAGGGAPMADNNEGADGVGNASGNWHCDSTWLGDRVITTSTRTWALPTYNNHLYKQISSXSSGSTNDNHYFGYSTPWGYFDFNRFHCHFSPRDWQRLINNNWGFRPKRLNFKLFNIQVKEVTTNDGVTTIANNLTSTVQVFSDSEYQLPYVLGSAHQGCLPPFPADVFMIPQYGYLTLNNGSQAVGRSSFYCLEYFPSQMLRTGNNFTFSYTFEDVPFHSSYAHSQSLDRLMNPLIDQYLYYLXRTQSTGGTAGNRELLFSQGGPXNMSAQAKNWLPGPCYRQQRVSKTLSQNNNSNFAWTGATKYHLNGRDSLVNPGVAMATHKDDEXRFFPSSGVLIFGKXGAGANNTXLXNVMXTXEEEIKTTNPVATEQYGVVASNLQSSNTAPXTGXVNSQGALPGMVWQNRDVYLQGPIWAKIPHTDGNFHPSPLMGGFGLKHPPPQILIKNTPVPANPPAXFXPAKFASFITQYSTGQVSVEIEWELQKENSKRWNPEIQYTSNYAKSTNVDFAVNXEGVYSEPRPIGTRYLTRNL

SEQ ID NO: 1164 - DNA, 2217 bp, Artificial Sequence
  Description of Artificial Sequence: Synthetic polynucleotide
atggctgccgatggttatcttccagattggctcgaggacactctctctgaaggaataagacagtggtggaagctcaaacctggcccaccaccaccaaagcccgcagagcggcataaggacgacagcaggggtcttgtgcttcctgggtacaagtacctcggacccttcaacggactcgacaagggagagccggtcaacgaggcagacgccgcggccctcgagcacgacaaagcctacgaccggcagctcgacagcggagacaacccgtacctcaagtacaaccacgccgacgcggagtttcaggagcgccttaaagaagatacgtcttttgggggcaacctcggacgagcagtcttccaggcgaaaaagagggttcttgaacctctgggcctggttgaggaacctgttaagacggctccgggaaagaagagaccggtagagccatcaccccagcgttctccagactcctctacgggcatcggcaagaaaggccaacagcccgccagaaaaagactcaattttggtcagactggcgactcagagtcagttccagaccctcaacctctcggagaacctccagcagcgccctctggtgtgggacctaatacaatggctgcaggcggtggcgcaccaatggcagacaataacgaaggcgccgacggagtgggtagttcctcgggaaattggcattgcgattccacatggctgggcgacagagtcatcaccaccagcacccgaacctgggccctgcccacctacaacaaccacctctacaagcaaatctccaacgggacatcgggaggagccaccaacgacaacacctacttcggctacagcaccccctgggggtattttgactttaacagattccactgccacttttcaccacgtgactggcagcgactcatcaacaacaactggggattccggcccaagagactcagcttcaagctcttcaacatccaggtcaaggaggtcacgcagaatgaaggcaccaagaccatcgccaataacctcaccagcaccatccaggtgtttacggactcggagtaccagctgccgtacgttctcggctctgcccaccagggctgcctgcctccgttcccggcggacgtgttcatgattccccagtacggctacctaacactcaacaacggtagtcaggccgtgggacgctcctccttctactgcctggaatactttccttcgcagatgctgagaaccggcaacaacttccagtttacttacaccttcgaggacgtgcctttccacagcagctacgcccacagccagagcttggaccggctgatgaatcctctgattgaccagtacctgtactacttgtctcggactcaaacaacaggaggcacggcaaatacgcagactctgggcttcagccaaggtgggcctaatacaatggccaatcaggcaaagaactggctgccaggaccctgttaccgccaacaacgcgtctcaacgacaaccgggcaaaacaacaatagcaactttgcctggactgctgggaccaaataccatctgaatggaagaaattcattggctaatcctggcatcgctatggcaacacacaaagacgacgaggagcgtttttttcccagtaacgggatcctgatttttggcaaacaaaatgctgccagagacaatgcggattacagcgatgtcatgctcaccagcgaggaagaaatcaaaaccactaaccctgtggctacagaggaatacggtatcgtggcagataacttgcagcagcaaaacacggctcctcaaattggaactgtcaacagccagggggccttacccggtatggtctggcagaaccgggacgtgtacctgcagggtcccatctgggccaagattcctcacacggacggcaacttccacccgtctccgctgatgggcggctttggcctgaaacatcctccgcctcagatcctgatcaagaacacgcctgtacctgcggatcctccgaccaccttcaaccagtcaaagctgaactctttcatcacgcaatacagcaccggacaggtcagcgtggaaattgaatgggagctgcagaaggaaaacagcaagcgctggaaccccgagatccagtacacctccaactactacaaatctacaagtgtggactttgctgttaatacagaaggcgtgtactctgaaccccgccccattggcacccgttacctcacccgtaatctgtaa

SEQ ID NO: 1165 - protein, 733 aa, Artificial Sequence; identical to SEQ ID NO: 950
  Description of Artificial Sequence: Synthetic polypeptide

SEQ ID NO: 1166 - DNA, 2203 bp, Artificial Sequence
  Description of Artificial Sequence: Synthetic polynucleotide
atgtcttttgttgatcaccctccagattggttggaagaagttggtgaaggtcttcgcgagtttttgggccttgaagcgggcccaccgaaaccaaaacccaatcagcagcatcaagatcaagcccgtggtcttgtgctgcctggttataactatctcggacccggaaacggtctcgatcgaggagagcctgtcaacagggcagacgaggtcgcgcgagagcacgacatctcgtacaacgagcagcttgaggcgggagacaacccctacctcaagtacaaccacgcggacgccgagtttcaggagaagctcgccgacgacacatccttcgggggaaacctcggaaaggcagtctttcaggccaagaaaagggttctcgaaccttttggcctggttgaagagggtgctaagacggcccctaccggaaagcggatagacgaccactttccaaaaagaaagaaggctcggaccgaagaggactccaagccttccacctcgtcagacgccgaagctggacccagcggatcccagcagctgcaaatcccagcccaaccagcctcaagtttgggagctgatacaatgtctgcgggaggtggcggcccattgggcgacaataaccaaggtgccgatggagtgggcaatgcctcgggagattggcattgcgattccacgtggatgggggacagagtcgtcaccaagtccacccgaacctgggtgctgcccagctacaacaaccaccagtaccgagagatcaaaagcggctccgtcgacggaagcaacgccaacgcctactttggatacagcaccccctgggggtactttgactttaaccgcttccacagccactggagcccccgagactggcaaagactcatcaacaactactggggcttcagaccccggtccctcagagtcaaaatcttcaacattcaagtcaaagaggtcacggtgcaggactccaccaccaccatcgccaacaacctcacctccaccgtccaagtgtttacggacgacgactaccagctgccctacgtcgtcggcaacgggaccgagggatgcctgccggccttccctccgcaggtctttacgctgccgcagtacggttacgcgacgctgaaccgcgacaacacagaaaatcccaccgagaggagcagcttcttctgcctagagtactttcccagcaagatgctgagaacgggcaacaactttgagtttacctacaactttgaggaggtgcccttccactccagcttcgctcccagtcagaacctgttcaagctggccaacccgctggtggaccagtacttgtaccgcttcgtgagcacaaataacactggcggagtccagttcaacaagaacctggccgggagatacgccaacacctacaaaaactggttcccggggcccatgggccgaacccagggctggaacctgggctccggggtcaaccgcgccagtgtcagcgccttcgccacgaccaataggatggagctcgagggcgcgagttaccaggtgcccccgcagccgaacggcatgaccaacaacctccagggcagcaacacctatgccctggagaacactatgatcttcaacagccagccggcgaacccgggcaccaccgccacgtacctcgagggcaacatgctcatcaccagcgagagcgagacgcagccggtgaaccgcgtggcgtacaacgtcggcgggcaggtggccaccaacaaccagagctccaccactgcccccgcgaccggcacgtacaacctccaggaaatcgtgcccggcagcgtgtggatggagagggacgtgtacctccaaggacccatctgggccaagatcccagagacgggggcgcactttcacccctctccggccatgggcggattcggactcaaacacccaccgcccatgatgctcatcaagaacacgcctgtgcccggaaatatcaccagcttctcggacgtgcccgtcagcagcttcatcacccagtacagcaccgggcaggtcaccgtggagatggagtgggagctcaagaaggaaaactccaagaggtggaacccagagatccagtacacaaacaactacaacgacccccagtttgtggactttgccccggacagcaccggggaatacagaaccaccagacctatcggaacccgataccttacccgacccctttaacccattcatgtcgcataccctcaataaa

SEQ ID NO: 1167 - protein, 724 aa, Artificial Sequence
  Description of Artificial Sequence: Synthetic polypeptide
MSFVDHPPDWLEEVGEGLREFLGLEAGPPKPKPNQQHQDQARGLVLPGYNYLGPGNGLDRGEPVNRADEVAREHDISYNEQLEAGDNPYLKYNHADAEFQEKLADDTSFGGNLGKAVFQAKKRVLEPFGLVEEGAKTAPTGKRIDDHFPKRKKARTEEDSKPSTSSDAEAGPSGSQQLQIPAQPASSLGADTMSAGGGGPLGDNNQGADGVGNASGDWHCDSTWMGDRVVTKSTRTWVLPSYNNHQYREIKSGSVDGSNANAYFGYSTPWGYFDFNRFHSHWSPRDWQRLINNYWGFRPRSLRVKIFNIQVKEVTVQDSTTTIANNLTSTVQVFTDDDYQLPYVVGNGTEGCLPAFPPQVFTLPQYGYATLNRDNTENPTERSSFFCLEYFPSKMLRTGNNFEFTYNFEEVPFHSSFAPSQNLFKLANPLVDQYLYRFVSTNNTGGVQFNKNLAGRYANTYKNWFPGPMGRTQGWNLGSGVNRASVSAFATTNRMELEGASYQVPPQPNGMTNNLQGSNTYALENTMIFNSQPANPGTTATYLEGNMLITSESETQPVNRVAYNVGGQVATNNQSSTTAPATGTYNLQEIVPGSVWMERDVYLQGPIWAKIPETGAHFHPSPAMGGFGLKHPPPMMLIKNTPVPGNITSFSDVPVSSFITQYSTGQVTVEMEWELKKENSKRWNPEIQYTNNYNDPQFVDFAPDSTGEYRTTRPIGTRYLTRPL

SEQ ID NO: 1168 - DNA, 2203 bp, Artificial Sequence
  Description of Artificial Sequence: Synthetic polynucleotide
atgtcttttgttgatcaccctccagattggttggaagaagttggtgaaggtcttcgcgagtttttgggccttgaagcgggcccaccgaaaccaaaacccaatcagcagcatcaagatcaagcccgtggtcttgtgctgcctggttataactatctcggacccggaaacggtctcgatcgaggagagcctgtcaacagggcagacgaggtcgcgcgagagcacgacatctcgtacaacgagcagcttgaggcgggagacaacccctacctcaagtacaaccacgcggacgccgagtttcaggagaagctcgccgacgacacatccttcgggggaaacctcggaaaggcagtctttcaggccaagaaaagggttctcgaaccttttggcctggttgaagagggtgctaagacggcccctaccggaaagcggatagacgaccactttccaaaaagaaagaaggctcggaccgaagaggactccaagccttccacctcgtcagacgccgaagctggacccagcggatcccagcagctgcaaatcccagcccaaccagcctcaagtttgggagctgatacaatgtctgcgggaggtggcggcccattgggcgacaataaccaaggtgccgatggagtgggcaatgcctcgggagattggcattgcgattccacgtggatgggggacagagtcgtcaccaagtccacccgaacctgggtgctgcccagctacaacaaccaccagtaccgagagatcaaaagcggctccgtcgacggaagcaacgccaacgcctactttggatacagcaccccctgggggtactttgactttaaccgcttccacagccactggagcccccgagactggcaaagactcatcaacaactactggggcttcagaccccggtccctcagagtcaaaatcttcaacattcaagtcaaagaggtcacggtgcaggactccaccaccaccatcgccaacaacctcacctccaccgtccaagtgtttacggacgacgactaccagctgccctacgtcgtcggcaacgggaccgagggatgcctgccggccttccctccgcaggtctttacgctgccgcagtacggttacgcgacgctgaaccgcgacaacacagaaaatcccaccgagaggagcagcttcttctgcctagagtactttcccagcaagatgctgagaacgggcaacaactttgagtttacctacaactttgaggaggtgcccttccactccagcttcgctcccagtcagaacctgttcaagctggccaacccgctggtggaccagtacttgtaccgcttcgtgagcacaaataacactggcggagtccagttcaacaagaacctggccgggagatacgccaacacctacaaaaactggttcccggggcccatgggccgaacccagggctggaacctgggctccggggtcaaccgcgccagtgtcagcgccttcgccacgaccaataggatggagctcgagggcgcgagttaccaggtgcccccgcagccgaacggcatgaccaacaacctccagggcagcaacacctatgccctggagaacactatgatcttcaacagccagccggcgaacccgggcaccaccgccacgtacctcgagggcaacatgctcatcaccagcgagagcgagacgcagccggtgaaccgcgtggcgtacaacgtcggcgggcagatggccaccaacaaccagagctccaccactgcccccgcgaccggcacggtcaacctccaggaaatcgtgcccggcagcgtgtggatggagagggacgtgtacctccaaggacccatctgggccaagatcccagagacgggggcgcactttcacccctctccggccatgggcggattcggactcaaacacccaccgcccatgatgctcatcaagaacacgcctgtgcccggaaatatcaccagcttctcggacgtgcccgtcagcagcttcatcacccagtacagcaccgggcaggtcaccgtggagatggagtgggagctcaagaaggaaaactccaagaggtggaacccagagatccagtacacaaacaactacaacgacccccagtttgtggactttgccccggacagcaccggggaatacagaaccaccagacctatcggaacccgataccttacccgacccctttaacccattcatgtcgcataccctcaataaa

SEQ ID NO: 1169 - protein, 724 aa, Artificial Sequence
  Description of Artificial Sequence: Synthetic polypeptide
MSFVDHPPDWLEEVGEGLREFLGLEAGPPKPKPNQQHQDQARGLVLPGYNYLGPGNGLDRGEPVNRADEVAREHDISYNEQLEAGDNPYLKYNHADAEFQEKLADDTSFGGNLGKAVFQAKKRVLEPFGLVEEGAKTAPTGKRIDDHFPKRKKARTEEDSKPSTSSDAEAGPSGSQQLQIPAQPASSLGADTMSAGGGGPLGDNNQGADGVGNASGDWHCDSTWMGDRVVTKSTRTWVLPSYNNHQYREIKSGSVDGSNANAYFGYSTPWGYFDFNRFHSHWSPRDWQRLINNYWGFRPRSLRVKIFNIQVKEVTVQDSTTTIANNLTSTVQVFTDDDYQLPYVVGNGTEGCLPAFPPQVFTLPQYGYATLNRDNTENPTERSSFFCLEYFPSKMLRTGNNFEFTYNFEEVPFHSSFAPSQNLFKLANPLVDQYLYRFVSTNNTGGVQFNKNLAGRYANTYKNWFPGPMGRTQGWNLGSGVNRASVSAFATTNRMELEGASYQVPPQPNGMTNNLQGSNTYALENTMIFNSQPANPGTTATYLEGNMLITSESETQPVNRVAYNVGGQMATNNQSSTTAPATGTVNLQEIVPGSVWMERDVYLQGPIWAKIPETGAHFHPSPAMGGFGLKHPPPMMLIKNTPVPGNITSFSDVPVSSFITQYSTGQVTVEMEWELKKENSKRWNPEIQYTNNYNDPQFVDFAPDSTGEYRTTRPIGTRYLTRPL

SEQ ID NO: 1170 - DNA, 2203 bp, Artificial Sequence
  Description of Artificial Sequence: Synthetic polynucleotide
atgtcttttgttgatcaccctccagattggttggaagaagttggtgaaggtcttcgcgagtttttgggccttgaagcgggcccaccgaaaccaaaacccaatcagcagcatcaagatcaagcccgtggtcttgtgctgcctggttataactatctcggacccggaaacggtctcgatcgaggagagcctgtcaacagggcagacgaggtcgcgcgagagcacgacatctcgtacaacgagcagcttgaggcgggagacaacccctacctcaagtacaaccacgcggacgccgagtttcaggagaagctcgccgacgacacatccttcgggggaaacctcggaaaggcagtctttcaggccaagaaaagggttctcgaaccttttggcctggttgaagagggtgctaagacggcccctaccggaaagcggatagacgaccactttccaaaaagaaagaaggctcggaccgaagaggactccaagccttccacctcgtcagacgccgaagctggacccagcggatcccagcagctgcaaatcccagcccaaccagcctcaagtttgggagctgatacaatgtctgcgggaggtggcggcccattgggcgacaataaccaaggtgccgatggagtgggcaatgcctcgggagattggcattgcgattccacgtggatgggggacagagtcgtcaccaagtccacccgaacctgggtgctgcccagctacaacaaccaccagtaccgagagatcaaaagcggctccgtcgacggaagcaacgccaacgcctactttggatacagcaccccctgggggtactttgactttaaccgcttccacagccactggagcccccgagactggcaaagactcatcaacaactactggggcttcagaccccggtccctcagagtcaaaatcttcaacattcaagtcaaagaggtcacggtgcaggactccaccaccaccatcgccaacaacctcacctccaccgtccaagtgtttacggacgacgactaccagctgccctacgtcgtcggcaacgggaccgagggatgcctgccggccttccctccgcaggtctttacgctgccgcagtacggttacgcgacgctgaaccgcgacaacacagaaaatcccaccgagaggagcagcttcttctgcctagagtactttcccagcaagatgctgagaacgggcaacaactttgagtttacctacaactttgaggaggtgcccttccactccagcttcgctcccagtcagaacctgttcaagctggccaacccgctggtggaccagtacttgtaccgcttcgtgagcacaaataacactggcggagtccagttcaacaagaacctggccgggagatacgccaacacctacaaaaactggttcccggggcccatgggccgaacccagggctggaacctgggctccggggtcaaccgcgccagtgtcagcgccttcgccacgaccaataggatggagctcgagggcgcgagttaccaggtgcccccgcagccgaacggcatgaccaacaacctccagggcagcaacacctatgccctggagaacactatgatcttcaacagccagccggcgaacccgggcaccaccgccacgtacctcgagggcaacatgctcatcaccagcgagagcgagacgcagccggtgaaccgcgtggcgtacaacgtcggcgggcagatggccaccaacaaccagagctccaccactgcccccgcgaccggcacgtacaacacccaggaaatcgtgcccggcagcgtgtggatggagagggacgtgtacctccaaggacccatctgggccaagatcccagagacgggggcgcactttcacccctctccggccatgggcggattcggactcaaacacccaccgcccatgatgctcatcaagaacacgcctgtgcccggaaatatcaccagcttctcggacgtgcccgtcagcagcttcatcacccagtacagcaccgggcaggtcaccgtggagatggagtgggagctcaagaaggaaaactccaagaggtggaacccagagatccagtacacaaacaactacaacgacccccagtttgtggactttgccccggacagcaccggggaatacagaaccaccagacctatcggaacccgataccttacccgacccctttaacccattcatgtcgcataccctcaataaa

SEQ ID NO: 1171 - protein, 724 aa, Artificial Sequence
  Description of Artificial Sequence: Synthetic polypeptide
MSFVDHPPDWLEEVGEGLREFLGLEAGPPKPKPNQQHQDQARGLVLPGYNYLGPGNGLDRGEPVNRADEVAREHDISYNEQLEAGDNPYLKYNHADAEFQEKLADDTSFGGNLGKAVFQAKKRVLEPFGLVEEGAKTAPTGKRIDDHFPKRKKARTEEDSKPSTSSDAEAGPSGSQQLQIPAQPASSLGADTMSAGGGGPLGDNNQGADGVGNASGDWHCDSTWMGDRVVTKSTRTWVLPSYNNHQYREIKSGSVDGSNANAYFGYSTPWGYFDFNRFHSHWSPRDWQRLINNYWGFRPRSLRVKIFNIQVKEVTVQDSTTTIANNLTSTVQVFTDDDYQLPYVVGNGTEGCLPAFPPQVFTLPQYGYATLNRDNTENPTERSSFFCLEYFPSKMLRTGNNFEFTYNFEEVPFHSSFAPSQNLFKLANPLVDQYLYRFVSTNNTGGVQFNKNLAGRYANTYKNWFPGPMGRTQGWNLGSGVNRASVSAFATTNRMELEGASYQVPPQPNGMTNNLQGSNTYALENTMIFNSQPANPGTTATYLEGNMLITSESETQPVNRVAYNVGGQMATNNQSSTTAPATGTYNTQEIVPGSVWMERDVYLQGPIWAKIPETGAHFHPSPAMGGFGLKHPPPMMLIKNTPVPGNITSFSDVPVSSFITQYSTGQVTVEMEWELKKENSKRWNPEIQYTNNYNDPQFVDFAPDSTGEYRTTRPIGTRYLTRPL

SEQ ID NO: 1172 - DNA, 2203 bp, Artificial Sequence
  Description of Artificial Sequence: Synthetic polynucleotide
atgtcttttgttgatcaccctccagattggttggaagaagttggtgaaggtcttcgcgagtttttgggccttgaagcgggcccaccgaaaccaaaacccaatcagcagcatcaagatcaagcccgtggtcttgtgctgcctggttataactatctcggacccggaaacggtctcgatcgaggagagcctgtcaacagggcagacgaggtcgcgcgagagcacgacatctcgtacaacgagcagcttgaggcgggagacaacccctacctcaagtacaaccacgcggacgccgagtttcaggagaagctcgccgacgacacatccttcgggggaaacctcggaaaggcagtctttcaggccaagaaaagggttctcgaaccttttggcctggttgaagagggtgctaagacggcccctaccggaaagcggatagacgaccactttccaaaaagaaagaaggctcggaccgaagaggactccaagccttccacctcgtcagacgccgaagctggacccagcggatcccagcagctgcaaatcccagcccaaccagcctcaagtttgggagctgatacaatgtctgcgggaggtggcggcccattgggcgacaataaccaaggtgccgatggagtgggcaatgcctcgggagattggcattgcgattccacgtggatgggggacagagtcgtcaccaagtccacccgaacctgggtgctgcccagctacaacaaccaccagtaccgagagatcaaaagcggctccgtcgacggaagcaacgccaacgcctactttggatacagcaccccctgggggtactttgactttaaccgcttccacagccactggagcccccgagactggcaaagactcatcaacaactactggggcttcagaccccggtccctcagagtcaaaatcttcaacattcaagtcaaagaggtcacggtgcaggactccaccaccaccatcgccaacaacctcacctccaccgtccaagtgtttacggacgacgactaccagctgccctacgtcgtcggcaacgggaccgagggatgcctgccggccttccctccgcaggtctttacgctgccgcagtacggttacgcgacgctgaaccgcgacaacacagaaaatcccaccgagaggagcagcttcttctgcctagagtactttcccagcaagatgctgagaacgggcaacaactttgagtttacctacaactttgaggaggtgcccttccactccagcttcgctcccagtcagaacctgttcaagctggccaacccgctggtggaccagtacttgtaccgcttcgtgagcacaaataacactggcggagtccagttcaacaagaacctggccgggagatacgccaacacctacaaaaactggttcccggggcccatgggccgaacccagggctggaacctgggctccggggtcaaccgcgccagtgtcagcgccttcgccacgaccaataggatggagctcgagggcgcgagttaccaggtgcccccgcagccgaacggcatgaccaacaacctccagggcagcaacacctatgccctggagaacactatgatcttcaacagccagccggcgaacccgggcaccaccgccacgtacctcgagggcaacatgctcatcaccagcgagagcgagacgcagccggtgaaccgcgtggcgtacaacgtcggcgggcagatggccaccaacaaccagagctccaccactgcccccgcgaccggcacggtcaacacccaggaaatcgtgcccggcagcgtgtggatggagagggacgtgtacctccaaggacccatctgggccaagatcccagagacgggggcgcactttcacccctctccggccatgggcggattcggactcaaacacccaccgcccatgatgctcatcaagaacacgcctgtgcccggaaatatcaccagcttctcggacgtgcccgtcagcagcttcatcacccagtacagcaccgggcaggtcaccgtggagatggagtgggagctcaagaaggaaaactccaagaggtggaacccagagatccagtacacaaacaactacaacgacccccagtttgtggactttgccccggacagcaccggggaatacagaaccaccagacctatcggaacccgataccttacccgacccctttaacccattcatgtcgcataccctcaataaa

SEQ ID NO: 1173 - protein, 724 aa, Artificial Sequence
  Description of Artificial Sequence: Synthetic polypeptide
MSFVDHPPDWLEEVGEGLREFLGLEAGPPKPKPNQQHQDQARGLVLPGYNYLGPGNGLDRGEPVNRADEVAREHDISYNEQLEAGDNPYLKYNHADAEFQEKLADDTSFGGNLGKAVFQAKKRVLEPFGLVEEGAKTAPTGKRIDDHFPKRKKARTEEDSKPSTSSDAEAGPSGSQQLQIPAQPASSLGADTMSAGGGGPLGDNNQGADGVGNASGDWHCDSTWMGDRVVTKSTRTWVLPSYNNHQYREIKSGSVDGSNANAYFGYSTPWGYFDFNRFHSHWSPRDWQRLINNYWGFRPRSLRVKIFNIQVKEVTVQDSTTTIANNLTSTVQVFTDDDYQLPYVVGNGTEGCLPAFPPQVFTLPQYGYATLNRDNTENPTERSSFFCLEYFPSKMLRTGNNFEFTYNFEEVPFHSSFAPSQNLFKLANPLVDQYLYRFVSTNNTGGVQFNKNLAGRYANTYKNWFPGPMGRTQGWNLGSGVNRASVSAFATTNRMELEGASYQVPPQPNGMTNNLQGSNTYALENTMIFNSQPANPGTTATYLEGNMLITSESETQPVNRVAYNVGGQMATNNQSSTTAPATGTVNTQEIVPGSVWMERDVYLQGPIWAKIPETGAHFHPSPAMGGFGLKHPPPMMLIKNTPVPGNITSFSDVPVSSFITQYSTGQVTVEMEWELKKENSKRWNPEIQYTNNYNDPQFVDFAPDSTGEYRTTRPIGTRYLTRPL

SEQ ID NO: 1174 - DNA, 2203 bp, Artificial Sequence
  Description of Artificial Sequence: Synthetic polynucleotide
atgtcttttgttgatcaccctccagattggttggaagaagttggtgaaggtcttcgcgagtttttgggccttgaagcgggcccaccgaaaccaaaacccaatcagcagcatcaagatcaagcccgtggtcttgtgctgcctggttataactatctcggacccggaaacggtctcgatcgaggagagcctgtcaacagggcagacgaggtcgcgcgagagcacgacatctcgtacaacgagcagcttgaggcgggagacaacccctacctcaagtacaaccacgcggacgccgagtttcaggagaagctcgccgacgacacatccttcgggggaaacctcggaaaggcagtctttcaggccaagaaaagggttctcgaaccttttggcctggttgaagagggtgctaagacggcccctaccggaaagcggatagacgaccactttccaaaaagaaagaaggctcggaccgaagaggactccaagccttccacctcgtcagacgccgaagctggacccagcggatcccagcagctgcaaatcccagcccaaccagcctcaagtttgggagctgatacaatgtctgcgggaggtggcggcccattgggcgacaataaccaaggtgccgatggagtgggcaatgcctcgggagattggcattgcgattccacgtggatgggggacagagtcgtcaccaagtccacccgaacctgggtgctgcccagctacaacaaccaccagtaccgagagatcaaaagcggctccgtcgacggaagcaacgccaacgcctactttggatacagcaccccctgggggtactttgactttaaccgcttccacagccactggagcccccgagactggcaaagactcatcaacaactactggggcttcagaccccggtccctcagagtcaaaatcttcaacattcaagtcaaagaggtcacggtgcaggactccaccaccaccatcgccaacaacctcacctccaccgtccaagtgtttacggacgacgactaccagctgccctacgtcgtcggcaacgggaccgagggatgcctgccggccttccctccgcaggtctttacgctgccgcagtacggttacgcgacgctgaaccgcgacaacacagaaaatcccaccgagaggagcagcttcttctgcctagagtactttcccagcaagatgctgagaacgggcaacaactttgagtttacctacaactttgaggaggtgcccttccactccagcttcgctcccagtcagaacctgttcaagctggccaacccgctggtggaccagtacttgtaccgcttcgtgagcacaaataacactggcggagtccagttcaacaagaacctggccgggagatacgccaacacctacaaaaactggttcccggggcccatgggccgaacccagggctggaacctgggctccggggtcaaccgcgccagtgtcagcgccttcgccacgaccaataggatggagctcgagggcgcgagttaccaggtgcccccgcagccgaacggcatgaccaacaacctccagggcagcaacacctatgccctggagaacactatgatcttcaacagccagccggcgaacccgggcaccaccgccacgtacctcgagggcaacatgctcatcaccagcgagagcgagacgcagccggtgaaccgcgtggcgtacaacgtcggcgggcagatggccaccaacaaccagagctccaccactgcccccgcgaccggcacgtacaacctccaggaaatcgtgcccggcagcgtgtggatggagagggacgtgtacctccaaggacccatctgggccaagatcccagagacgggggcgcactttcacccctctccggccatgggcggattcggactcaaacacccaccgcccatgatgctcatcaagaacacgcctgtgcccggaaatatcaccagcttctcggccgtgcccgtcagcagcttcatcacccagtacagcaccgggcaggtcaccgtggagatggagtgggagctcaagaaggaaaactccaagaggtggaacccagagatccagtacacaaacaactacaacgacccccagtttgtggactttgccccggacagcaccggggaatacagaaccaccagacctatcggaacccgataccttacccgacccctttaacccattcatgtcgcataccctcaataaa

SEQ ID NO: 1175 - protein, 724 aa, Artificial Sequence
  Description of Artificial Sequence: Synthetic polypeptide
MSFVDHPPDWLEEVGEGLREFLGLEAGPPKPKPNQQHQDQARGLVLPGYNYLGPGNGLDRGEPVNRADEVAREHDISYNEQLEAGDNPYLKYNHADAEFQEKLADDTSFGGNLGKAVFQAKKRVLEPFGLVEEGAKTAPTGKRIDDHFPKRKKARTEEDSKPSTSSDAEAGPSGSQQLQIPAQPASSLGADTMSAGGGGPLGDNNQGADGVGNASGDWHCDSTWMGDRVVTKSTRTWVLPSYNNHQYREIKSGSVDGSNANAYFGYSTPWGYFDFNRFHSHWSPRDWQRLINNYWGFRPRSLRVKIFNIQVKEVTVQDSTTTIANNLTSTVQVFTDDDYQLPYVVGNGTEGCLPAFPPQVFTLPQYGYATLNRDNTENPTERSSFFCLEYFPSKMLRTGNNFEFTYNFEEVPFHSSFAPSQNLFKLANPLVDQYLYRFVSTNNTGGVQFNKNLAGRYANTYKNWFPGPMGRTQGWNLGSGVNRASVSAFATTNRMELEGASYQVPPQPNGMTNNLQGSNTYALENTMIFNSQPANPGTTATYLEGNMLITSESETQPVNRVAYNVGGQMATNNQSSTTAPATGTYNLQEIVPGSVWMERDVYLQGPIWAKIPETGAHFHPSPAMGGFGLKHPPPMMLIKNTPVPGNITSFSAVPVSSFITQYSTGQVTVEMEWELKKENSKRWNPEIQYTNNYNDPQFVDFAPDSTGEYRTTRPIGTRYLTRPL

SEQ ID NO: 1176 - DNA, 2203 bp, Artificial Sequence
  Description of Artificial Sequence: Synthetic polynucleotide
atgtcttttgttgatcaccctccagattggttggaagaagttggtgaaggtcttcgcgagtttttgggccttgaagcgggcccaccgaaaccaaaacccaatcagcagcatcaagatcaagcccgtggtcttgtgctgcctggttataactatctcggacccggaaacggtctcgatcgaggagagcctgtcaacagggcagacgaggtcgcgcgagagcacgacatctcgtacaacgagcagcttgaggcgggagacaacccctacctcaagtacaaccacgcggacgccgagtttcaggagaagctcgccgacgacacatccttcgggggaaacctcggaaaggcagtctttcaggccaagaaaagggttctcgaaccttttggcctggttgaagagggtgctaagacggcccctaccggaaagcggatagacgaccactttccaaaaagaaagaaggctcggaccgaagaggactccaagccttccacctcgtcagacgccgaagctggacccagcggatcccagcagctgcaaatcccagcccaaccagcctcaagtttgggagctgatacaatgtctgcgggaggtggcggcccattgggcgacaataaccaaggtgccgatggagtgggcaatgcctcgggagattggcattgcgattccacgtggatgggggacagagtcgtcaccaagtccacccgaacctgggtgctgcccagctacaacaaccaccagtaccgagagatcaaaagcggctccgtcgacggaagcaacgccaacgcctactttggatacagcaccccctgggggtactttgactttaaccgcttccacagccactggagcccccgagactggcaaagactcatcaacaactactggggcttcagaccccggtccctcagagtcaaaatcttcaacattcaagtcaaagaggtcacggtgcaggactccaccaccaccatcgccaacaacctcacctccaccgtccaagtgtttatggacgacgactaccagctgccctacgtcgtcggcaacgggaccgagggatgcctgccggccttccctccgcaggtctttacgctgccgcagtacggttacgcgacgctgaaccgcgacaacacagaaaatcccaccgagaggagcagcttcttctgcctagagtactttcccagcaagatgctgagaacgggcaacaactttgagtttacctacaactttgaggaggtgcccttccactccagcttcgctcccagtcagaacctgttcaagctggccaacccgctggtggaccagtacttgtaccgcttcgtgagcacaaataacactggcggagtccagttcaacaagaacctggccgggagatacgccaacacctacaaaaactggttcccggggcccatgggccgaacccagggctggaacctgggctccggggtcaaccgcgccagtgtcagcgccttcgccacgaccaataggatggagctcgagggcgcgagttaccaggtgcccccgcagccgaacggcatgaccaacaacctccagggcagcaacacctatgccctggagaacactatgatcttcaacagccagccggcgaacccgggcaccaccgccacgtacctcgagggcaacatgctcatcaccagcgagagcgagacgcagccggtgaaccgcgtggcgtacaacgtcggcgggcagatggccaccaacaaccagagctccaccactgcccccgcgaccggcacgtacaacctccaggaaatcgtgcccggcagcgtgtggatggagagggacgtgtacctccaaggacccatctgggccaagatcccagagacgggggcgcactttcacccctctccggccatgggcggattcggactcaaacacccaccgcccatgatgctcatcaagaacacgcctgtgcccggaaatatcaccagcttctcggacgtgcccgtcagcagcttcatcacccagtacagcaccgggcaggtcaccgtggagatggagtgggagctcaagaaggaaaactccaagaggtggaacccagagatccagtacacaaacaactacaacgacccccagtttgtggactttgccccggacagcaccggggaatacagaaccaccagacctatcggaacccgataccttacccgacccctttaacccattcatgtcgcataccctcaataaa

SEQ ID NO: 1177 - protein, 724 aa, Artificial Sequence
  Description of Artificial Sequence: Synthetic polypeptide
MSFVDHPPDWLEEVGEGLREFLGLEAGPPKPKPNQQHQDQARGLVLPGYNYLGPGNGLDRGEPVNRADEVAREHDISYNEQLEAGDNPYLKYNHADAEFQEKLADDTSFGGNLGKAVFQAKKRVLEPFGLVEEGAKTAPTGKRIDDHFPKRKKARTEEDSKPSTSSDAEAGPSGSQQLQIPAQPASSLGADTMSAGGGGPLGDNNQGADGVGNASGDWHCDSTWMGDRVVTKSTRTWVLPSYNNHQYREIKSGSVDGSNANAYFGYSTPWGYFDFNRFHSHWSPRDWQRLINNYWGFRPRSLRVKIFNIQVKEVTVQDSTTTIANNLTSTVQVFMDDDYQLPYVVGNGTEGCLPAFPPQVFTLPQYGYATLNRDNTENPTERSSFFCLEYFPSKMLRTGNNFEFTYNFEEVPFHSSFAPSQNLFKLANPLVDQYLYRFVSTNNTGGVQFNKNLAGRYANTYKNWFPGPMGRTQGWNLGSGVNRASVSAFATTNRMELEGASYQVPPQPNGMTNNLQGSNTYALENTMIFNSQPANPGTTATYLEGNMLITSESETQPVNRVAYNVGGQMATNNQSSTTAPATGTYNLQEIVPGSVWMERDVYLQGPIWAKIPETGAHFHPSPAMGGFGLKHPPPMMLIKNTPVPGNITSFSDVPVSSFITQYSTGQVTVEMEWELKKENSKRWNPEIQYTNNYNDPQFVDFAPDSTGEYRTTRPIGTRYLTRPL

SEQ ID NO: 1178 - DNA, 2203 bp, Artificial Sequence
  Description of Artificial Sequence: Synthetic polynucleotide
atgtcttttgttgatcaccctccagattggttggaagaagttggtgaaggtcttcgcgagtttttgggccttgaagcgggcccaccgaaaccaaaacccaatcagcagcatcaagatcaagcccgtggtcttgtgctgcctggttataactatctcggacccggaaacggtctcgatcgaggagagcctgtcaacagggcagacgaggtcgcgcgagagcacgacatctcgtacaacgagcagcttgaggcgggagacaacccctacctcaagtacaaccacgcggacgccgagtttcaggagaagctcgccgacgacacatccttcgggggaaacctcggaaaggcagtctttcaggccaagaaaagggttctcgaaccttttggcctggttgaagagggtgctaagacggcccctaccggaaagcggatagacgaccactttccaaaaagaaagaaggctcggaccgaagaggactccaagccttccacctcgtcagacgccgaagctggacccagcggatcccagcagctgcaaatcccagcccaaccagcctcaagtttgggagctgatacaatgtctgcgggaggtggcggcccattgggcgacaataaccaaggtgccgatggagtgggcaatgcctcgggagattggcattgcgattccacgtggatgggggacagagtcgtcaccaagtccacccgaacctgggtgctgcccagctacaacaaccaccagtaccgagagatcaaaagcggctccgtcgacggaagcaacgccaacgcctactttggatacagcaccccctgggggtactttgactttaaccgcttccacagccactggagcccccgagactggcaaagactcatcaacaactactggggcttcagaccccggtccctcagagtcaaaatcttcaacattcaagtcaaagaggtcacggtgcaggactccaccaccaccatcgccaacaacctcacctccaccgtcgatgtgtttacggacgacgactaccagctgccctacgtcgtcggcaacgggaccgagggatgcctgccggccttccctccgcaggtctttacgctgccgcagtacggttacgcgacgctgaaccgcgacaacacagaaaatcccaccgagaggagcagcttcttctgcctagagtactttcccagcaagatgctgagaacgggcaacaactttgagtttacctacaactttgaggaggtgcccttccactccagcttcgctcccagtcagaacctgttcaagctggccaacccgctggtggaccagtacttgtaccgcttcgtgagcacaaataacactggcggagtccagttcaacaagaacctggccgggagatacgccaacacctacaaaaactggttcccggggcccatgggccgaacccagggctggaacctgggctccggggtcaaccgcgccagtgtcagcgccttcgccacgaccaataggatggagctcgagggcgcgagttaccaggtgcccccgcagccgaacggcatgaccaacaacctccagggcagcaacacctatgccctggagaacactatgatcttcaacagccagccggcgaacccgggcaccaccgccacgtacctcgagggcaacatgctcatcaccagcgagagcgagacgcagccggtgaaccgcgtggcgtacaacgtcggcgggcagatggccaccaacaaccagagctccaccactgcccccgcgaccggcacgtacaacctccaggaaatcgtgcccggcagcgtgtggatggagagggacgtgtacctccaaggacccatctgggccaagatcccagagacgggggcgcactttcacccctctccggccatgggcggattcggactcaaacacccaccgcccatgatgctcatcaagaacacgcctgtgcccggaaatatcaccagcttctcggacgtgcccgtcagcagcttcatcacccagtacagcaccgggcaggtcaccgtggagatggagtgggagctcaagaaggaaaactccaagaggtggaacccagagatccagtacacaaacaactacaacgacccccagtttgtggactttgccccggacagcaccggggaatacagaaccaccagacctatcggaacccgataccttacccgacccctttaacccattcatgtcgcataccctcaataaa

SEQ ID NO: 1179 - protein, 724 aa, Artificial Sequence
  Description of Artificial Sequence: Synthetic polypeptide
MSFVDHPPDWLEEVGEGLREFLGLEAGPPKPKPNQQHQDQARGLVLPGYNYLGPGNGLDRGEPVNRADEVAREHDISYNEQLEAGDNPYLKYNHADAEFQEKLADDTSFGGNLGKAVFQAKKRVLEPFGLVEEGAKTAPTGKRIDDHFPKRKKARTEEDSKPSTSSDAEAGPSGSQQLQIPAQPASSLGADTMSAGGGGPLGDNNQGADGVGNASGDWHCDSTWMGDRVVTKSTRTWVLPSYNNHQYREIKSGSVDGSNANAYFGYSTPWGYFDFNRFHSHWSPRDWQRLINNYWGFRPRSLRVKIFNIQVKEVTVQDSTTTIANNLTSTVDVFTDDDYQLPYVVGNGTEGCLPAFPPQVFTLPQYGYATLNRDNTENPTERSSFFCLEYFPSKMLRTGNNFEFTYNFEEVPFHSSFAPSQNLFKLANPLVDQYLYRFVSTNNTGGVQFNKNLAGRYANTYKNWFPGPMGRTQGWNLGSGVNRASVSAFATTNRMELEGASYQVPPQPNGMTNNLQGSNTYALENTMIFNSQPANPGTTATYLEGNMLITSESETQPVNRVAYNVGGQMATNNQSSTTAPATGTYNLQEIVPGSVWMERDVYLQGPIWAKIPETGAHFHPSPAMGGFGLKHPPPMMLIKNTPVPGNITSFSDVPVSSFITQYSTGQVTVEMEWELKKENSKRWNPEIQYTNNYNDPQFVDFAPDSTGEYRTTRPIGTRYLTRPL

SEQ ID NO: 1180 - DNA, 2203 bp, Artificial Sequence
  Description of Artificial Sequence: Synthetic polynucleotide
atgtcttttgttgatcaccctccagattggttggaagaagttggtgaaggtcttcgcgagtttttgggccttgaagcgggcccaccgaaaccaaaacccaatcagcagcatcaagatcaagcccgtggtcttgtgctgcctggttataactatctcggacccggaaacggtctcgatcgaggagagcctgtcaacagggcagacgaggtcgcgcgagagcacgacatctcgtacaacgagcagcttgaggcgggagacaacccctacctcaagtacaaccacgcggacgccgagtttcaggagaagctcgccgacgacacatccttcgggggaaacctcggaaaggcagtctttcaggccaagaaaagggttctcgaaccttttggcctggttgaagagggtgctaagacggcccctaccggaaagcggatagacgaccactttccaaaaagaaagaaggctcggaccgaagaggactccaagccttccacctcgtcagacgccgaagctggacccagcggatcccagcagctgcaaatcccagcccaaccagcctcaagtttgggagctgatacaatgtctgcgggaggtggcggcccattgggcgacaataaccaaggtgccgatggagtgggcaatgcctcgggagattggcattgcgattccacgtggatgggggacagagtcgtcaccaagtccacccgaacctgggtgctgcccagctacaacaaccaccagtaccgagagatcaaaagcggctccgtcgacggaagcaacgccaacgcctactttggatacagcaccccctgggggtactttgactttaaccgcttccacagccactggagcccccgagactggcaaagactcatcaacaactactggggcttcagaccccggtccctcagagtcaaaatcttcaacattcaagtcaaagaggtcacggtgcaggactccaccaccaccatcgccaacaacctcacctccaccgtccaagtgtttacggacgacgactaccagctgccctacgtcgtcggcaacgggacccagggatgcctgccggccttccctccgcaggtctttacgctgccgcagtacggttacgcgacgctgaaccgcgacaacacagaaaatcccaccgagaggagcagcttcttctgcctagagtactttcccagcaagatgctgagaacgggcaacaactttgagtttacctacaactttgaggaggtgcccttccactccagcttcgctcccagtcagaacctgttcaagctggccaacccgctggtggaccagtacttgtaccgcttcgtgagcacaaataacactggcggagtccagttcaacaagaacctggccgggagatacgccaacacctacaaaaactggttcccggggcccatgggccgaacccagggctggaacctgggctccggggtcaaccgcgccagtgtcagcgccttcgccacgaccaataggatggagctcgagggcgcgagttaccaggtgcccccgcagccgaacggcatgaccaacaacctccagggcagcaacacctatgccctggagaacactatgatcttcaacagccagccggcgaacccgggcaccaccgccacgtacctcgagggcaacatgctcatcaccagcgagagcgagacgcagccggtgaaccgcgtggcgtacaacgtcggcgggcagatggccaccaacaaccagagctccaccactgcccccgcgaccggcacgtacaacctccaggaaatcgtgcccggcagcgtgtggatggagagggacgtgtacctccaaggacccatctgggccaagatcccagagacgggggcgcactttcacccctctccggccatgggcggattcggactcaaacacccaccgcccatgatgctcatcaagaacacgcctgtgcccggaaatatcaccagcttctcggacgtgcccgtcagcagcttcatcacccagtacagcaccgggcaggtcaccgtggagatggagtgggagctcaagaaggaaaactccaagaggtggaacccagagatccagtacacaaacaactacaacgacccccagtttgtggactttgccccggacagcaccggggaatacagaaccaccagacctatcggaacccgataccttacccgacccctttaacccattcatgtcgcataccctcaataaa

SEQ ID NO: 1181 - protein, 724 aa, Artificial Sequence
  Description of Artificial Sequence: Synthetic polypeptide
MSFVDHPPDWLEEVGEGLREFLGLEAGPPKPKPNQQHQDQARGLVLPGYNYLGPGNGLDRGEPVNRADEVAREHDISYNEQLEAGDNPYLKYNHADAEFQEKLADDTSFGGNLGKAVFQAKKRVLEPFGLVEEGAKTAPTGKRIDDHFPKRKKARTEEDSKPSTSSDAEAGPSGSQQLQIPAQPASSLGADTMSAGGGGPLGDNNQGADGVGNASGDWHCDSTWMGDRVVTKSTRTWVLPSYNNHQYREIKSGSVDGSNANAYFGYSTPWGYFDFNRFHSHWSPRDWQRLINNYWGFRPRSLRVKIFNIQVKEVTVQDSTTTIANNLTSTVQVFTDDDYQLPYVVGNGTQGCLPAFPPQVFTLPQYGYATLNRDNTENPTERSSFFCLEYFPSKMLRTGNNFEFTYNFEEVPFHSSFAPSQNLFKLANPLVDQYLYRFVSTNNTGGVQFNKNLAGRYANTYKNWFPGPMGRTQGWNLGSGVNRASVSAFATTNRMELEGASYQVPPQPNGMTNNLQGSNTYALENTMIFNSQPANPGTTATYLEGNMLITSESETQPVNRVAYNVGGQMATNNQSSTTAPATGTYNLQEIVPGSVWMERDVYLQGPIWAKIPETGAHFHPSPAMGGFGLKHPPPMMLIKNTPVPGNITSFSDVPVSSFITQYSTGQVTVEMEWELKKENSKRWNPEIQYTNNYNDPQFVDFAPDSTGEYRTTRPIGTRYLTRPL

SEQ ID NO: 1182 - DNA, 2203 bp, Artificial Sequence
  Description of Artificial Sequence: Synthetic polynucleotide
atgtcttttgttgatcaccctccagattggttggaagaagttggtgaaggtcttcgcgagtttttgggccttgaagcgggcccaccgaaaccaaaacccaatcagcagcatcaagatcaagcccgtggtcttgtgctgcctggttataactatctcggacccggaaacggtctcgatcgaggagagcctgtcaacagggcagacgaggtcgcgcgagagcacgacatctcgtacaacgagcagcttgaggcgggagacaacccctacctcaagtacaaccacgcggacgccgagtttcaggagaagctcgccgacgacacatccttcgggggaaacctcggaaaggcagtctttcaggccaagaaaagggttctcgaaccttttggcctggttgaagagggtgctaagacggcccctaccggaaagcggatagacgaccactttccaaaaagaaagaaggctcggaccgaagaggactccaagccttccacctcgtcagacgccgaagctggacccagcggatcccagcagctgcaaatcccagcccaaccagcctcaagtttgggagctgatacaatgtctgcgggaggtggcggcccattgggcgacaataaccaaggtgccgatggagtgggcaatgcctcgggagattggcattgcgattccacgtggatgggggacagagtcgtcaccaagtccacccgaacctgggtgctgcccagctacaacaaccaccagtaccgagagatcaaaagcggctccgtcgacggaagcaacgccaacgcctactttggatacagcaccccctgggggtactttgactttaaccgcttccacagccactggagcccccgagactggcaaagactcatcaacaactactggggcttcagaccccggtccctcagagtcaaaatcttcaacattcaagtcaaagaggtcacggtgcaggactccaccaccaccatcgccaacaacctcacctccaccgtccaagtgtttacggacgacgactaccagctgccctacgtcgtcggcaacgggaccgagggatgcctgccggccttccctccgcaggtctttacgctgccgcagtacggttacgcgacgctgaaccgcgacaacacagaaaatcccaccgagaggagcagcttcttctgcctagagtactttcccagcaagatgctgagaacgggcaacaactttgagtttacctacaactttgaggaggtgcccttccactccagcttcgctcccagtcagaacctgttcaagctggccaacccgctggtggaccagtacttgtaccgcttcgtgagcacaaataacactggcggagtccagttcaacaagaacctggccgggagatacgccaacacctacaaaaactggttcccggggcccatgggccgaacccagggctggaacctgggctccggggtcaaccgcgccagtgtcagcgccttcgccacgaccaataggatggagctcgagggcgcgagttaccaggtgcccccgcagccgaacggcatgaccaacaacctccagggcagcaacacctatgccctggagaacactatgatcttcaacagccagtcggcgaacccgggcaccaccgccacgtacctcgagggcaacatgctcatcaccagcgagagcgagacgcagccggtgaaccgcgtggcgtacaacgtcggcgggcagatggccaccaacaaccagagctccaccactgcccccgcgaccggcacgtacaacctccaggaaatcgtgcccggcagcgtgtggatggagagggacgtgtacctccaaggacccatctgggccaagatcccagagacgggggcgcactttcacccctctccggccatgggcggattcggactcaaacacccaccgcccatgatgctcatcaagaacacgcctgtgcccggaaatatcaccagcttctcggacgtgcccgtcagcagcttcatcacccagtacagcaccgggcaggtcaccgtggagatggagtgggagctcaagaaggaaaactccaagaggtggaacccagagatccagtacacaaacaactacaacgacccccagtttgtggactttgccccggacagcaccggggaatacagaaccaccagacctatcggaacccgataccttacccgacccctttaacccattcatgtcgcataccctcaataaa

SEQ ID NO: 1183 - protein, 724 aa, Artificial Sequence
  Description of Artificial Sequence: Synthetic polypeptide
MSFVDHPPDWLEEVGEGLREFLGLEAGPPKPKPNQQHQDQARGLVLPGYNYLGPGNGLDRGEPVNRADEVAREHDISYNEQLEAGDNPYLKYNHADAEFQEKLADDTSFGGNLGKAVFQAKKRVLEPFGLVEEGAKTAPTGKRIDDHFPKRKKARTEEDSKPSTSSDAEAGPSGSQQLQIPAQPASSLGADTMSAGGGGPLGDNNQGADGVGNASGDWHCDSTWMGDRVVTKSTRTWVLPSYNNHQYREIKSGSVDGSNANAYFGYSTPWGYFDFNRFHSHWSPRDWQRLINNYWGFRPRSLRVKIFNIQVKEVTVQDSTTTIANNLTSTVQVFTDDDYQLPYVVGNGTEGCLPAFPPQVFTLPQYGYATLNRDNTENPTERSSFFCLEYFPSKMLRTGNNFEFTYNFEEVPFHSSFAPSQNLFKLANPLVDQYLYRFVSTNNTGGVQFNKNLAGRYANTYKNWFPGPMGRTQGWNLGSGVNRASVSAFATTNRMELEGASYQVPPQPNGMTNNLQGSNTYALENTMIFNSQSANPGTTATYLEGNMLITSESETQPVNRVAYNVGGQMATNNQSSTTAPATGTYNLQEIVPGSVWMERDVYLQGPIWAKIPETGAHFHPSPAMGGFGLKHPPPMMLIKNTPVPGNITSFSDVPVSSFITQYSTGQVTVEMEWELKKENSKRWNPEIQYTNNYNDPQFVDFAPDSTGEYRTTRPIGTRYLTRPL

SEQ ID NO: 1184 - DNA, 2203 bp, Artificial Sequence
  Description of Artificial Sequence: Synthetic polynucleotide
atgtcttttgttgatcaccctccagattggttggaagaagttggtgaaggtcttcgcgagtttttgggccttgaagcgggcccaccgaaaccaaaacccaatcagcagcatcaagatcaagcccgtggtcttgtgctgcctggttataactatctcggacccggaaacggtctcgatcgaggagagcctgtcaacagggcagacgaggtcgcgcgagagcacgacatctcgtacaacgagcagcttgaggcgggagacaacccctacctcaagtacaaccacgcggacgccgagtttcaggagaagctcgccgacgacacatccttcgggggaaacctcggaaaggcagtctttcaggccaagaaaagggttctcgaaccttttggcctggttgaagagggtgctaagacggcccctaccggaaagcggatagacgaccactttccaaaaagaaagaaggctcggaccgaagaggactccaagccttccacctcgtcagacgccgaagctggacccagcggatcccagcagctgcaaatcccagcccaaccagcctcaagtttgggagctgatacaatgtctgcgggaggtggcggcccattgggcgacaataaccaaggtgccgatggagtgggcaatgcctcgggagattggcattgcgattccacgtggatgggggacagagtcgtcaccaagtccacccgaacctgggtgctgcccagctacaacaaccaccagtaccgagagatcaaaagcggctccgtcgacggaagcaacgccaacgcctactttggatacagcaccccctgggggtactttgactttaaccgcttccacagccactggagcccccgagactggcaaagactcatcaacaactactggggcttcagaccccggtccctcagagtcaaaatcttcaacattcaagtcaaagaggtcacggtgcaggactccaccaccaccatcgccaacaacctcacctccaccgtccaagtgtttacggacgacgactaccagctgccctacgtcgtcggcaacgggaccgagggatgcctgccggccttccctccgcaggtctttacgctgccgcagtacggttacgcgacgctgaaccgcgacaacacagaaaatcccaccgagaggagcagcttcttctgcctagagtactttcccagcaagatgctgagaacgggcaacaactttgagtttacctacaactttgaggaggtgcccttccactccagcttcgctcccagtcagaacctgttcaagctggccaacccgctggtggaccagtacttgtaccgcttcgtgagcacaaataacactggcggagtccagttcaacaagaacctggccgggagatacgccaacacctacaaaaactggttcccggggcccatgggccgaacccagggctggaacctgggctccggggtcaaccgcgccagtgtcagcgccttcgccacgaccaataggatggagctcgagggcgcgagttaccaggtgcccccgcagccgaacggcatgaccaacaacctccagggcagcaacacctatgccctggagaacactatgatcttcaacagccagggggcgaacccgggcaccaccgccacgtacctcgagggcaacatgctcatcaccagcgagagcgagacgcagccggtgaaccgcgtggcgtacaacgtcggcgggcagatggccaccaacaaccagagctccaccactgcccccgcgaccggcacgtacaacctccaggaaatcgtgcccggcagcgtgtggatggagagggacgtgtacctccaaggacccatctgggccaagatcccagagacgggggcgcactttcacccctctccggccatgggcggattcggactcaaacacccaccgcccatgatgctcatcaagaacacgcctgtgcccggaaatatcaccagcttctcggacgtgcccgtcagcagcttcatcacccagtacagcaccgggcaggtcaccgtggagatggagtgggagctcaagaaggaaaactccaagaggtggaacccagagatccagtacacaaacaactacaacgacccccagtttgtggactttgccccggacagcaccggggaatacagaaccaccagacctatcggaacccgataccttacccgacccctttaacccattcatgtcgcataccctcaataaa

SEQ ID NO: 1185 - protein, 724 aa, Artificial Sequence
  Description of Artificial Sequence: Synthetic polypeptide
MSFVDHPPDWLEEVGEGLREFLGLEAGPPKPKPNQQHQDQARGLVLPGYNYLGPGNGLDRGEPVNRADEVAREHDISYNEQLEAGDNPYLKYNHADAEFQEKLADDTSFGGNLGKAVFQAKKRVLEPFGLVEEGAKTAPTGKRIDDHFPKRKKARTEEDSKPSTSSDAEAGPSGSQQLQIPAQPASSLGADTMSAGGGGPLGDNNQGADGVGNASGDWHCDSTWMGDRVVTKSTRTWVLPSYNNHQYREIKSGSVDGSNANAYFGYSTPWGYFDFNRFHSHWSPRDWQRLINNYWGFRPRSLRVKIFNIQVKEVTVQDSTTTIANNLTSTVQVFTDDDYQLPYVVGNGTEGCLPAFPPQVFTLPQYGYATLNRDNTENPTERSSFFCLEYFPSKMLRTGNNFEFTYNFEEVPFHSSFAPSQNLFKLANPLVDQYLYRFVSTNNTGGVQFNKNLAGRYANTYKNWFPGPMGRTQGWNLGSGVNRASVSAFATTNRMELEGASYQVPPQPNGMTNNLQGSNTYALENTMIFNSQGANPGTTATYLEGNMLITSESETQPVNRVAYNVGGQMATNNQSSTTAPATGTYNLQEIVPGSVWMERDVYLQGPIWAKIPETGAHFHPSPAMGGFGLKHPPPMMLIKNTPVPGNITSFSDVPVSSFITQYSTGQVTVEMEWELKKENSKRWNPEIQYTNNYNDPQFVDFAPDSTGEYRTTRPIGTRYLTRPL

SEQ ID NO: 1186 - DNA, 2194 bp, Artificial Sequence
  Description of Artificial Sequence: Synthetic polynucleotide
atgtcttttgttgatcaccctccagattggttggaagaagttggtgaaggtcttcgcgagtttttgggccttgaagcgggcccaccgaaaccaaaacccaatcagcagcatcaagatcaagcccgtggtcttgtgctgcctggttataactatctcggacccggaaacggtctcgatcgaggagagcctgtcaacagggcagacgaggtcgcgcgagagcacgacatctcgtacaacgagcagcttgaggcgggagacaacccctacctcaagtacaaccacgcggacgccgagtttcaggagaagctcgccgacgacacatccttcgggggaaacctcggaaaggcagtctttcaggccaagaaaagggttctcgaaccttttggcctggttgaagagggtgctaagacggcccctaccggaaagcggatagacgaccactttccaaaaagaaagaaggctcggaccgaagaggactccaagccttccacctcgtcagacgccgaagctggacccagcggatcccagcagctgcaaatcccagcccaaccagcctcaagtttgggagctgatacaatgtctgcgggaggtggcggcccattgggcgacaataaccaaggtgccgatggagtgggcaatgcctcgggagattggcattgcgattccacgtggatgggggacagagtcgtcaccaagtccacccgaacctgggtgctgcccagctacaacaaccaccagtaccgagagatcaaaagcggctccgtcgacggaagcaacgccaacgcctactttggatacagcaccccctgggggtactttgactttaaccgcttccacagccactggagcccccgagactggcaaagactcatcaacaactactggggcttcagaccccggtccctcagagtcaaaatcttcaacattcaagtcaaagaggtcacggtgcaggactccaccaccaccatcgccaacaacctcacctccaccgtccaagtgtttacggacgacgactaccagctgccctacgtcgtcggcaacgggaccgagggatgcctgccggccttccctccgcaggtctttacgctgccgcagtacggttacgcgacgctgaaccgcgacaacacagaaaatcccaccgagaggagcagcttcttctgcctagagtactttcccagcaagatgctgagaacgggcaacaactttgagtttacctacaactttgaggaggtgcccttccactccagcttcgctcccagtcagaacctgttcaagctggccaacccgctggtggaccagtacttgtaccgcttcgtgagcacaaataacactggcggagtccagttcaacaagaacctggccgggagatacgccaacacctacaaaaactggttcccggggcccatgggccgaacccagggctggaacctgggctccggggtcaaccgcgccagtgtcagcgccttcgccacgaccaataggatggagctcgagggcgcgagttaccaggtgcccccgcagccgaacggcatgaccaacaacctccagggcagcaacacctatgccctggagaacactatgatcttcgggaagcaaggctcagagaaaacaaatgtggacattgaaaaggtcatgatcaccagcgagagcgagacgcagccggtgaaccgcgtggcgtacaacgtcggcgggcagatggccaccaacaaccagagctccaccactgcccccgcgaccggcacgtacaacctccaggaaatcgtgcccggcagcgtgtggatggagagggacgtgtacctccaaggacccatctgggccaagatcccagagacgggggcgcactttcacccctctccggccatgggcggattcggactcaaacacccaccgcccatgatgctcatcaagaacacgcctgtgcccggaaatatcaccagcttctcggacgtgcccgtcagcagcttcatcacccagtacagcaccgggcaggtcaccgtggagatggagtgggagctcaagaaggaaaactccaagaggtggaacccagagatccagtacacaaacaactacaacgacccccagtttgtggactttgccccggacagcaccggggaatacagaaccaccagacctatcggaacccgataccttacccgacccctttaacccattcatgtcgcataccctcaataaa

SEQ ID NO: 1187 - protein, 721 aa, Artificial Sequence
  Description of Artificial Sequence: Synthetic polypeptide
MSFVDHPPDWLEEVGEGLREFLGLEAGPPKPKPNQQHQDQARGLVLPGYNYLGPGNGLDRGEPVNRADEVAREHDISYNEQLEAGDNPYLKYNHADAEFQEKLADDTSFGGNLGKAVFQAKKRVLEPFGLVEEGAKTAPTGKRIDDHFPKRKKARTEEDSKPSTSSDAEAGPSGSQQLQIPAQPASSLGADTMSAGGGGPLGDNNQGADGVGNASGDWHCDSTWMGDRVVTKSTRTWVLPSYNNHQYREIKSGSVDGSNANAYFGYSTPWGYFDFNRFHSHWSPRDWQRLINNYWGFRPRSLRVKIFNIQVKEVTVQDSTTTIANNLTSTVQVFTDDDYQLPYVVGNGTEGCLPAFPPQVFTLPQYGYATLNRDNTENPTERSSFFCLEYFPSKMLRTGNNFEFTYNFEEVPFHSSFAPSQNLFKLANPLVDQYLYRFVSTNNTGGVQFNKNLAGRYANTYKNWFPGPMGRTQGWNLGSGVNRASVSAFATTNRMELEGASYQVPPQPNGMTNNLQGSNTYALENTMIFGKQGSEKTNVDIEKVMITSESETQPVNRVAYNVGGQMATNNQSSTTAPATGTYNLQEIVPGSVWMERDVYLQGPIWAKIPETGAHFHPSPAMGGFGLKHPPPMMLIKNTPVPGNITSFSDVPVSSFITQYSTGQVTVEMEWELKKENSKRWNPEIQYTNNYNDPQFVDFAPDSTGEYRTTRPIGTRYLTRPL

SEQ ID NO: 1188 - protein, 519 aa, Artificial Sequence
  Description of Artificial Sequence: Synthetic polypeptide
DGVGSSSGNWHCDSTWLGDRVITTSTRTWALPTYNNHLYKQISNGTSGGATNDNTYFGYSTPWGYFDFNRFHCHFSPRDWQRLINNNWGFRPKRLSFKLFNIQVKEVTQNEGTKTIANNLTSTIQVFTDSEYQLPYVLGSAHQGCLPPFPADVFMIPQYGYLTLNNGSQAVGRSSFYCLEYFPSQMLRTGNNFQFTYTFEDVPFHSSYAHSQSLDRLMNPLIDQYLYYLSRTQTTGGTANTQTLGFSQGGPNTMANQAKNWLPGPCYRQQRVSTTTGQNNNSNFAWTAGTKYHLNGRNSLANPGIAMATHKDDEERFFPSNGILIFGKQNAARDNADYSDVMLTSEEEIKTTNPVATEEYGIVADNLQQQNTAPQIGTVNSQGALPGMVWQNRDVYLQGPIWAKIPHTDGNFHPSPLMGGFGLKHPPPQILIKNTPVPADPPTTFNQSKLNSFITQYSTGQVSVEIEWELQKENSKRWNPEIQYTSNYYKSTSVDFAVNTEGVYSEPRPIGTRYLTRNL

SEQ ID NO: 1189 - protein, 738 aa, Artificial Sequence
  Description of Artificial Sequence: Synthetic polypeptide
MAADGYLPDWLEDNLSEGIREWWALQPGAPKPKANQQHQDNARGLVLPGYKYLGPGNGLDKGEPVNAADAAALEHDKAYDQQLKAGDNPYLKYNHADAEFQERLKEDTSFGGNLGRAVFQAKKRLLEPLGLVEEAAKTAPGKKRPVEPSPQRSPDSSTGIGKKGQQPARKRLNFGQTGDSESVPDPQPLGEPPAAPSGVGPNTMAAGGGAPMADNNEGADGVGSSSGNWHCDSTWLGDRVITTSTRTWALPTYNNHLYKQISNGTSGGATNDNTYFGYSTPWGYFDFNRFHCHFSPRDWQRLINNNWGFRPKRLSFKLFNIQVKEVTQNEGTKTIANNLTSTIQVFTDSEYQLPYVLGSAHQGCLPPFPADVFMIPQYGYLTLNNGSQAVGRSSFYCLEYFPSQMLRTGNNFQFTYTFEDVPFHSSYAHSQSLDRLMNPLIDQYLYYLSRTQTTGGTANTQTLGFSQGGPNTMANQAKNWLPGPCYRQQRVSTTTGQNNNSNFAWTAGTKYHLNGRNSLANPGIAMATHKDDEERFFPSNGILIFGKQNAARDNADYSDVMLTSEEEIKTTNPVATEEYGIVADNLQQQNTAPQIGTVNSQGALPGMVWQNRDVYLQGPIWAKIPHTDGNFHPSPLMGGFGLKHPPPQILIKNTPVPADPPTTFNQSKLNSFITQYSTGQVSVEIEWELQKENSKRWNPEIQYTSNYYKSTSVDFAVNTEGVYSEPRPIGTRYLTRNL

SEQ ID NO: 1190 - protein, 725 aa, Artificial Sequence
  Description of Artificial Sequence: Synthetic polypeptide
MAADGYLPDWLEDNLSEGIREWWALQPGAPKPKANQQHQDNARGLVLPGYKYLGPGNGLDKGEPVNAADAAALEHDKAYDQQLKAGDNPYLKYNHADAEFQERLKEDTSFGGNLGRAVFQAKKRLLEPLGLVEEAAKTAPTGKRIDDHFPKRKKARTEEDSKPSTSSDAEAGPSGSQQLQIPAQPASSLGADTMSAGGGGPLGDNNQGADGVGNASGDWHCDSTWMGDRVVTKSTRTWVLPSYNNHQYREIKSGSVDGSNANAYFGYSTPWGYFDFNRFHSHWSPRDWQRLINNYWGFRPRSLRVKIFNIQVKEVTVQDSTTTIANNLTSTVQVFTDDDYQLPYVVGNGTEGCLPAFPPQVFTLPQYGYATLNRDNTENPTERSSFFCLEYFPSKMLRTGNNFEFTYNFEEVPFHSSFAPSQNLFKLANPLVDQYLYRFVSTNNTGGVQFNKNLAGRYANTYKNWFPGPMGRTQGWNLGSGVNRASVSAFATTNRMELEGASYQVPPQPNGMTNNLQGSNTYALENTMIFNSQPANPGTTATYLEGNMLITSESETQPVNRVAYNVGGQMATNNQSSTTAPATGTYNLQEIVPGSVWMERDVYLQGPIWAKIPETGAHFHPSPAMGGFGLKHPPPMMLIKNTPVPGNITSFSDVPVSSFITQYSTGQVTVEMEWELKKENSKRWNPEIQYTNNYNDPQFVDFAPDSTGEYRTTRPIGTRYLTRPL

SEQ ID NO: 1191 - protein, 736 aa, Artificial Sequence
  Description of Artificial Sequence: Synthetic polypeptide
MAADGYLPDWLEDNLSEGIREWWALKPGAPKPKANQQKQDDGRGLVLPGYKYLGPFNGLDKGEPVNAADAAALEHDKAYDQQLQAGDNPYLRYNHADAEFQERLQEDTSFGGNLGRAVFQAKKRVLEPLGLVEEGAKTAPGKKRPVDQSPQEPDSSSGVGKSGKQPARKRLNFGQTGDSESVPDPQPLGEPPAAPTSLGSNTMASGGGAPMADNNEGADGVGNSSGNWHCDSQWLGDRVITTSTRTWALPTYNNHLYKQISSQSGASNDNHYFGYSTPWGYFDFNRFHCHFSPRDWQRLINNNWGFRPKKLSFKLFNIQVKEVTQNDGTTTIANNLTSTVQVFTDSEYQLPYVLGSAHQGCLPPFPADVFMVPQYGYLTLNNGSQAVGRSSFYCLEYFPSQMLRTGNNFQFSYTFEDVPFHSSYAHSQSLDRLMNPLIDQYLYYLNRTQGTTSGTTNQSRLLFSQAGPQSMSLQARNWLPGPCYRQQRLSKTANDNNNSNFPWTAASKYHLNGRDSLVNPGPAMASHKDDEEKFFPMHGNLIFGKEGTTASNAELDNVMITDEEEIRTTNPVATEQYGTVANNLQSSNTAPTTRTVNDQGALPGMVWQDRDVYLQGPIWAKIPHTDGHFHPSPLMGGFGLKHPPPQIMIKNTPVPANPPTTFSPAKFASFITQYSTGQVSVEIEWELQKENSKRWNPEIQYTSNYNKSVNVDFTVDTNGVYSEPRPIGTRYLTRNL

SEQ ID NO: 1192 - protein, 735 aa, Artificial Sequence
  Description of Artificial Sequence: Synthetic polypeptide
MSFVDHPPDWLEEVGEGLREFLGLEAGPPKPKPNQQHQDQARGLVLPGYNYLGPGNGLDRGEPVNRADEVAREHDISYNEQLEAGDNPYLKYNHADAEFQEKLADDTSFGGNLGKAVFQAKKRVLEPFGLVEEGAKTAPGKKRPVDQSPQEPDSSSGVGKSGKQPARKRLNFGQTGDSESVPDPQPLGEPPAAPTSLGSNTMASGGGAPMADNNEGADGVGNSSGNWHCDSQWLGDRVITTSTRTWALPTYNNHLYKQISSQSGASNDNHYFGYSTPWGYFDFNRFHCHFSPRDWQRLINNNWGFRPKKLSFKLFNIQVKEVTQNDGTTTIANNLTSTVQVFTDSEYQLPYVLGSAHQGCLPPFPADVFMVPQYGYLTLNNGSQAVGRSSFYCLEYFPSQMLRTGNNFQFSYTFEDVPFHSSYAHSQSLDRLMNPLIDQYLYYLNRTQGTTSGTTNQSRLLFSQAGPQSMSLQARNWLPGPCYRQQRLSKTANDNNNSNFPWTAASKYHLNGRDSLVNPGPAMASHKDDEEKFFPMHGNLIFGKEGTTASNAELDNVMITDEEEIRTTNPVATEQYGTVANNLQSSNTAPTTRTVNDQGALPGMVWQDRDVYLQGPIWAKIPHTDGHFHPSPLMGGFGLKHPPPQIMIKNTPVPANPPTTFSPAKFASFITQYSTGQVSVEIEWELQKENSKRWNPEIQYTSNYNKSVNVDFTVDTNGVYSEPRPIGTRYLTRPL

SEQ ID NO: 1193 - protein, 736 aa, Artificial Sequence
  Description of Artificial Sequence: Synthetic polypeptide
MAADGYLPDWLEDNLSEGIREWWALKPGAPKPKANQQKQDDGRGLVLPGYKYLGPFNGLDKGEPVNAADAAALEHDKAYDQQLQAGDNPYLRYNHADAEFQERLQEDTSFGGNLGRAVFQAKKRVLEPLGLVEEGAKTAPGKKRPVEPSPQRSPDSSTGIGKKGQQPARKRLNFGQTGDSESVPDPQPLGEPPAAPSGVGPNTMAAGGGAPMADNNEGADGVGSSSGNWHCDSTWLGDRVITTSTRTWALPTYNNHLYKQISSQSGASNDNHYFGYSTPWGYFDFNRFHCHFSPRDWQRLINNNWGFRPKRLSFKLFNIQVKEVTQNEGTKTIANNLTSTIQVFTDSEYQLPYVLGSAHQGCLPPFPADVFMIPQYGYLTLNNGSQAVGRSSFYCLEYFPSQMLRTGNNFQFTYTFEDVPFHSSYAHSQSLDRLMNPLIDQYLYYLSRTQTTGGTANTQTLGFSQGGPNTMANQAKNWLPGPCYRQQRVSTTTGQNNNSNFAWTAGTKYHLNGRNSLANPGIAMATHKDDEERFFPSNGILIFGKQGTTASNAELDNVMITDEEEIKTTNPVATEEYGIVADNLQQQNTAPQIGTVNSQGALPGMVWQNRDVYLQGPIWAKIPHTDGNFHPSPLMGGFGLKHPPPQILIKNTPVPADPPTTFNQSKLNSFITQYSTGQVSVEIEWELQKENSKRWNPEIQYTSNYNKSVNVDFTVDTNGVYSEPRPIGTRYLTRNL

SEQ ID NO: 1194 - protein, 736 aa, Artificial Sequence
  Description of Artificial Sequence: Synthetic polypeptide
MAADGYLPDWLEDNLSEGIREWWALKPGAPKPKANQQKQDDGRGLVLPGYKYLGPFNGLDKGEPVNAADAAALEHDKAYDQQLQAGDNPYLRYNHADAEFQERLQEDTSFGGNLGRAVFQAKKRVLEPLGLVEEGAKTAPGKKRPVEPSPQRSPDSSTGIGKKGQQPARKRLNFGQTGDSESVPDPQPLGEPPAAPSGVGPNTMAAGGGAPMADNNEGADGVGSSSGNWHCDSTWLGDRVITTSTRTWALPTYNNHLYKQISSQSGASNDNHYFGYSTPWGYFDFNRFHCHFSPRDWQRLINNNWGFRPKRLSFKLFNIQVKEVTQNEGTKTIANNLTSTIQVFTDSEYQLPYVLGSAHQGCLPPFPADVFMIPQYGYLTLNNGSQAVGRSSFYCLEYFPSQMLRTGNNFQFTYTFEDVPFHSSYAHSQSLDRLMNPLIDQYLYYLSRTQTTGGTANTQTLGFSQGGPNTMANQAKNWLPGPCYRQQRVSTTTGQNNNSNFAWTAGTKYHLNGRNSLANPGIAMATHKDDEERFFPSNGILIFGKQNAARDNADYSDVMLTSEEEIKTTNPVATEEYGIVADNLQQQNTAPQIGTVNSQGALPGMVWQNRDVYLQGPIWAKIPHTDGNFHPSPLMGGFGLKHPPPQILIKNTPVPADPPTTFNQSKLNSFITQYSTGQVSVEIEWELQKENSKRWNPEIQYTSNYYKSTSVDFAVNTEGVYSEPRPIGTRYLTRNL

SEQ ID NO: 1195 - protein, 736 aa, Artificial Sequence
  Description of Artificial Sequence: Synthetic polypeptide
MAADGYLPDWLEDNLSEGIREWWDLKPGAPKPKANQQKQDDGRGLVLPGYKYLGPFNGLDKGEPVNAADAAALEHDKAYDQQLKAGDNPYLRYNHADAEFQERLQEDTSFGGNLGRAVFQAKKRVLEPLGLVEEGAKTAPGKKRPVEQSPQEPDSSSGIGKTGQQPAKKRLNFGQTGDTESVPDPQPLGEPPAAPSGLGPNTMASGGGAPMADNNEGADGVGNSSGNWHCDSTWLGDRVITTSTRTWALPTYNNHLYKQISNGTSGGSTNDNTYFGYSTPWGYFDFNRFHCHFSPRDWQRLINNNWGFRPKRLNFKLFNIQVKEVTTNEGTKTIANNLTSTVQVFTDSEYQLPYVLGSAHQGCLPPFPADVFMVPQYGYLTLNNGSQALGRSSFYCLEYFPSQMLRTGNNFQFSYTFEDVPFHSSYAHSQSLDRLMNPLIDQYLYYLVRTQTTGTGGTQTLAFSQAGPSSMASQARNWVPGPSYRQQRVSTTTNQNNNSNFAWTGAAKFKLNGRDSLMNPGVAMASHKDDEDRFFPSSGVLIFGKQGAGNDGVDYSQVLITDEEEIKATNPVATEEYGAVAINNQAANTQAQTGLVHNQGVIPGMVWQNRDVYLQGPIWAKIPHTDGNFHPSPLMGGFGLKHPPPQILIKNTPVPADPPLTFNQAKLNSFITQYSTGQVSVEIEWELQKENSKRWNPEIQYTSNYYKSTNVDFAVNTEGVYSEPRPIGTRYLTRNL

SEQ ID NO: 1196 - DNA, 3695 bp, Artificial Sequence
  Description of Artificial Sequence: Synthetic polynucleotide
ctctttgcgcttgcgttttcccttgtccagatagcccagtagctgacattcatccggggtcagcaccgtttctgcggactggctttctacgtgaaaaggatctaggtgaagatcctttttgataatctcatgcctgacatttatattccccagaacatcaggttaatggcgtttttgatgtcattttcgcggtggctgagatcagccacttcttccccgataacggagaccggcacactggccatatcggtggtcatcatgcgccagctttcatccccgatatgcaccaccgggtaaagttcacgggagactttatctgacagcagacgtgcactggccagggggatcaccatccgtcgccccggcgtgtcaataatatcactctgtacatccacaaacagacgataacggctctctcttttataggtgtaaaccttaaactgccgtacgtataggctgcgcaactgttgggaagggcgatcggtgcgggcctcttcgctattacgccagctggcgaaagggggatgtgctgcaaggcgattaagttgggtaacgccagggttttcccagtcacgacgttgtaaaacgacggccagtgaattgtaatacgactcactatagggcgaattgaatttagcggccgcgaattcgcccttatgatatctggtgggaggagggcaagatgacggccaaggtcgtggagtccgccaaggccattctcggcggcagcaaagtgcgcgtggaccaaaagtgcaagtcgtccgcccagatcgatcccactcccgtcattgtcacctccaacaccaacatgtgcgccgtgattgacgggaacagcaccaccttcgagcaccagcagccgttgcaggaccggatgttcaaatttgaacttacccgccgtctggagcatgactttggcaaggtgacaaagcaggaagtcaaagagttcttccgctgggcgcaggatcacgtgaccgaggtggcgcatgagttccacgtcagaaagggtggagccaacaagagacccgcccccgatgacgctgataaaagcgagcccaagcgggcctgcccctcagtcgcagatccatcgacgtcagacgcggaaggagctccggtggactttgccgacaggtaccaaaacaaatgttctcgtcacgcgggcatgcttcagatgctgtttccctgcaagacatgcgagagaatgaatcagaatttcaacatttgcttcacgcacgggaccagggactgttcggagtgcttccccggcgtgtcagaatctcaaccggtcgtcagaaaaaggacgtatcggaaactctgtgccattcatcatctgctggggagggctcccgagattgcttgctcggcctgcgatctggtcaacgtggacctggatgactgtgtctctgagcaataaatgacttaaaccaggtatggctgccgatggttatcttccagattggctcgaggacaacctctctgagggcattcgcgagtggtgggacttgaaacctggagccccgaaacccaaagccaaccagcaaaagcaggacgacggccggggtctggtgcttcctggctacaagtacctcggacccttcaacggactcgacaagggggagcccgtcaacgcggcggacgcagcggccctcgagcacgacaaggcctacgaccagcagctcaaagcgggtgacaatccgtacctgcggtataaccacgccgacgccgagtttcaggagcgtctgcaagaagatacgtcttttgggggcaacctcgggcgagcagtcttccaggccaagaagcgggttctcgaacctctcggtctggttgaggaaggcgctaagacggctcctggaaagaagagaccggtagagcagtcaccccaagaaccagactcctcatcgggcatcggcaagacaggccagcagcccgctaaaaagagactcaattttggtcagactggcgacacagagtcagtccccgacccacaacctctcggagaacctccagcagccccctcaggtctgggacctaatacaatggcttcaggcggtggcgctccaatggcagacaataacgaaggcgccgacggagtgggtaattcctcgggaaattggcattgcgattccacatggctgggggacagagtcatcaccaccagcacccgaacctgggccctgcccacctacaacaaccacctctacaagcaaatctccaacggcacctcgggaggaagcaccaacgacaacacctactttggctacagcaccccctgggggtattttgacttcaacagattccactgccacttttcaccacgtgactggcagcgactcatcaacaacaattggggattccggcccaagagactcaacttcaagctcttcaacatccaggtcaaggaagtcacgacgaacgaaggcaccaagaccatcgccaataatctcaccagcaccgtgcaggtctttacggactcggagtaccagctaccgtacgtgctaggatcagctcaccagggatgtctgcctccgttcccggcggacgtcttcatggttcctcagtacggttatctaactctgaacaatggcagccaggccctgggacgttcctccttctactgcctggagtatttcccatcgcagatgctgagaaccggcaacaactttcagttcagctacaccttcgaggacgtgcctttccacagcagctacgcgcacagccaaagcctggacaggctgatgaatcccctcatcgaccagtacctgtattacctggtcagaacgcagacaaccgggactggagggacgcagactctggcattcagccaagcaggccctagctcaatggccagccaggctagaaactgggtgcccggaccgagctaccggcagcagcgcgtctccacgacaaccaaccagaacaacaacagcaactttgcctggacgggagctgccaaatttaaactgaacggccgagactctctaatgaaccccggcgtggccatggcttcacacaaggatgacgaggaccgcttcttcccttctagcggggtcctgattttcggcaagcaaggagccgggaatgatggagtggattacagccaagtgctgattacagatgaggaagaaatcaaggctaccaaccccgtggcaacagaggaatatggagcagtggccatcaacaaccaggccgctaatacgcaggcgcagaccggactcgtgcacaaccagggggtgattcccggcatggtgtggcagaacagagacgtgtacctgcagggtcccatctgggccaaaattcctcacacggacggcaactttcacccgtctcccctgatgggcggctttggactgaagcacccgcctcctcaaattctcatcaagaacacaccggttccagcggacccgccgcttaccttcaaccaggccaagctgaactctttcatcacgcagtacagcaccggacaggtcagcgtggaaatcgagtgggagctgcagaaagaaaacagcaaacgctggaatccagagattcagtacacttccaactactacaaatctacaaatgtggactttgctgtcaacacggaaggagtgtatagcgagcctcgccccattggcacccgttacctcacccgcaacctgtaattgcctgttaatcaataaaccggttaattcgtttcagtaaggaagaattcgtttaaa

SEQ ID NO: 1197 - protein, 736 aa, Artificial Sequence; identical to SEQ ID NO: 516
  Description of Artificial Sequence: Synthetic polypeptide

SEQ ID NO: 1198 - protein, 736 aa, Artificial Sequence
  Description of Artificial Sequence: Synthetic polypeptide
MAADGYLPDWLEDNLSEGIREWWDLKPGAPKPKANQQKQDDGRGLVLPGYKYLGPFNGLDKGEPVNAADAAALEHDKAYDQQLKAGDNPYLRYNHADAEFQERLQEDTSFGGNLGRAVFQAKKRVLEPLGLVEEGAKTAPGKKRPVEQSPQEPDSSSGIGKTGQQPAKKRLNFGQTGDTESVPDPQPLGEPPAAPSGLGPNTMASGGGAPMADNNEGADGVGNSSGNWHCDSTWLGDRVITTSTRTWALPTYNNHLYKQISNGTSGGSTNDNTYFGYSTPWGYFDFNRFHCHFSPRDWQRLINNNWGFRPKRLNFKLFNIQVKEVTTNEGTKTIANNLTSTVQVFTDSEYQLPYVLGSAHQGCLPPFPADVFMVPQYGYLTLNNGSQALGRSSFYCLEYFPSQMLRTGNNFQFSYTFEDVPFHSSYAHSQSLDRLMNPLIDQYLYYLVRTQTTGTGGTQTLAFSQAGPSNMASQARNWVPGPSYRQQRVSTTTNQNNNSNFAWTGAAKFKLNGRDSLMNPGVAMASHKDDEDRFFPSSGVLIFGKQGAGNDGVDYSQVLITDEEEIKATNPVATEEYGAVAINNQAANTQAQTGLVHNQGVIPGMVWQNRDVYLQGPIWAKIPHTDGNFHPSPLMGGFGLKHPPPQILIKNTPVPADPPLTFNQAKLNSFITQYSTGQVSVEIEWELQKENSKRWNPEIQYTSNYYKSTNVDFAVNTEGVYSEPRPIGTRYLTRNL

SEQ ID NO: 1199 - protein, 738 aa, Artificial Sequence; identical to SEQ ID NO: 893
  Description of Artificial Sequence: Synthetic polypeptide

SEQ ID NO: 1200 - protein, 736 aa, Artificial Sequence
  Description of Artificial Sequence: Synthetic polypeptide
MAADGYLPDWLEDNLSEGIREWWALQPGAPKPKANQQHQDNARGLVLPGYKYLGPGNGLDKGEPVNAADAAALEHDKAYDQQLKAGDNPYLKYNHADAEFQERLKEDTSFGGNLGRAVFQAKKRILEPLGLVEEAAKTAPGKKRPVDQSPQEPDSSSGVGKSGKQPARKRLNFGQTGDSESVPDPQPLGEPPAAPTSLGSNTMASGGGAPMADNNEGADGVGNSSGNWHCDSQWLGDRVITTSTRTWALPTYNNHLYKQISSQSGASNDNHYFGYSTPWGYFDFNRFHCHFSPRDWQRLINNNWGFRPKKLSFKLFNIQVKEVTQNDGTTTIANNLTSTVQVFTDSEYQLPYVLGSAHQGCLPPFPADVFMVPQYGYLTLNNGSQAVGRSSFYCLEYFPSQMLRTGNNFQFSYTFEDVPFHSSYAHSQSLDRLMNPLIDQYLYYLNRTQGTTSGTTNQSRLLFSQAGPQSMSLQARNWLPGPCYRQQRLSKTANDNNNSNFPWTAASKYHLNGRDSLVNPGPAMASHKDDEEKFFPMHGNLIFGKEGTTASNAELDNVMITDEEEIRTTNPVATEQYGTVANNLQSSNTAPTTRTVNDQGALPGMVWQDRDVYLQGPIWAKIPHTDGHFHPSPLMGGFGLKHPPPQIMIKNTPVPANPPTTFSPAKFASFITQYSTGQVSVEIEWELQKENSKRWNPEIQYTSNYNKSVNVDFTVDTNGVYSEPRPIGTRYLTRPL

SEQ ID NO: 1201 - protein, 736 aa, Artificial Sequence
  Description of Artificial Sequence: Synthetic polypeptide
MAADGYLPDWLEDNLSEGIREWWALQPGAPKPKANQQHQDNARGLVLPGYKYLGPGNGLDKGEPVNAADAAALEHDKAYDQQLKAGDNPYLKYNHADAEFQERLKEDTSFGGNLGRAVFQAKKRLLEPLGLVEEAAKTAPGKKRPVDQSPQEPDSSSGVGKSGKQPARKRLNFGQTGDSESVPDPQPLGEPPAAPTSLGSNTMASGGGAPMADNNEGADGVGNSSGNWHCDSQWLGDRVITTSTRTWALPTYNNHLYKQISSQSGASNDNHYFGYSTPWGYFDFNRFHCHFSPRDWQRLINNNWGFRPKKLSFKLFNIQVKEVTQNDGTTTIANNLTSTVQVFTDSEYQLPYVLGSAHQGCLPPFPADVFMVPQYGYLTLNNGSQAVGRSSFYCLEYFPSQMLRTGNNFQFSYTFEDVPFHSSYAHSQSLDRLMNPLIDQYLYYLNRTQGTTSGTTNQSRLLFSQAGPQSMSLQARNWLPGPCYRQQRLSKVANDNNNSNFPWTAASKYHLNGRDSLVNPGPAMASHKDDEEKFFPMHGNLIFGKEGTTASNAELDNVMITDEEEIRTTNPVATEQYGTVANNLQSSNTAPTTRTVNDQGALPGMVWQDRDVYLQGPIWAKIPHTDGHFHPSPLMGGFGLKHPPPQIMIKNTPVPANPPTTFVPAKFASFITQYSTGQVSVEIEWELQKENSKRWNPEIQYTSNYNKSVNVDFTVDTNGVYSEPRPIGTRYLTRPL

SEQ ID NO: 1202 - protein, 736 aa, Artificial Sequence
  Description of Artificial Sequence: Synthetic polypeptide
  MOD_RES (168)..(168): Lys or Arg
  MOD_RES (204)..(204): Ala or Ser
  MOD_RES (266)..(266): Ala or Gly
  MOD_RES (311)..(311): Arg or Lys
  MOD_RES (411)..(411): Glu or Gln
  MOD_RES (460)..(460): Thr or Glu
  MOD_RES (493)..(493): Ala or Thr
  MOD_RES (562)..(562): Ser or Asn
  MOD_RES (576)..(576): Gln or Glu
  MOD_RES (587)..(587): Ser or Ala
  MOD_RES (609)..(609): Asn or Asp
MAADGYLPDWLEDNLSEGIREWWDLKPGAPKPKANQQKQDDGRGLVLPGYKYLGPFNGLDKGEPVNAADAAALEHDKAYDQQLKAGDNPYLRYNHADAEFQERLQEDTSFGGNLGRAVFQAKKRVLEPLGLVEEGAKTAPGKKRPVEQSPQEPDSSSGIGKKGQQPAXKRLNFGQTGDSESVPDPQPLGEPPAAPSGVGSNTMXAGGGAPMADNNEGADGVGNASGNWHCDSTWLGDRVITTSTRTWALPTYNNHLYKQISSQSGXSTNDNTYFGYSTPWGYFDFNRFHCHFSPRDWQRLINNNWGFRPKXLNFKLFNIQVKEVTTNDGTTTIANNLTSTVQVFTDSEYQLPYVLGSAHQGCLPPFPADVFMIPQYGYLTLNNGSQAVGRSSFYCLEYFPSQMLRTGNNFXFSYTFEDVPFHSSYAHSQSLDRLMNPLIDQYLYYLSRTQTTSGTAGNRXLQFSQAGPSSMANQAKNWLPGPCYRQQRVSKTXNQNNNSNFAWTGATKYHLNGRDSLVNPGPAMATHKDDEDKFFPMSGVLIFGKQGAGNSNVDLDNVMITXEEEIKTTNPVATEXYGTVATNLQSXNTAPATGTVNSQGALPGMVWQXRDVYLQGPIWAKIPHTDGHFHPSPLMGGFGLKHPPPQILIKNTPVPANPPTTFSPAKFASFITQYSTGQVSVEIEWELQKENSKRWNPEIQYTSNYNKSTNVDFAVDTNGVYSEPRPIGTRYLTRNL

SEQ ID NO: 1203 - DNA, 2208 bp, Artificial Sequence
  Description of Artificial Sequence: Synthetic polynucleotide
  misc_feature (502)..(504): This region may encompass aag or aaa
  misc_feature (610)..(612): This region may encompass gca or agc
  misc_feature (796)..(798): This region may encompass gca or ggc
  misc_feature (931)..(933): This region may encompass aga or aag
  misc_feature (1231)..(1233): This region may encompass gag or cag
  misc_feature (1378)..(1380): This region may encompass acg or gag
  misc_feature (1477)..(1479): This region may encompass gcg or acc
  misc_feature (1684)..(1686): This region may encompass agt or aac
  misc_feature (1726)..(1728): This region may encompass cag or gag
  misc_feature (1759)..(1761): This region may encompass tca or gcc
  misc_feature (1825)..(1827): This region may encompass aac or gac
atggctgccgatggttatcttccagattggctcgaggacaacctctctgagggcattcgcgagtggtgggacttgaaacctggagccccgaaacccaaagccaaccagcaaaagcaggacgacggccggggtctggtgcttcctggctacaagtacctcggacccttcaacggactcgacaagggggagcccgtcaacgcggcggacgcagcggccctcgagcacgacaaggcctacgaccagcagctcaaagcgggtgacaatccgtacctgcggtataaccacgccgacgccgagtttcaggagcgtctgcaagaagatacgtcttttgggggcaacctcgggcgagcagtcttccaggccaagaagcgggttctcgaacctctcggtctggttgaggaaggcgctaagacggctcctggaaagaagagaccggtagagcaatcaccccaggaaccagactcctcttcgggcatcggcaagaaaggccagcagcccgcgnnnaagagactcaactttgggcagacaggcgactcagagtcagtgcccgaccctcaaccactcggagaaccccccgcagccccctctggtgtgggatctaatacaatgnnngcaggcggtggcgctccaatggcagacaataacgaaggcgccgacggagtgggtaacgcctcaggaaattggcattgcgattccacatggctgggcgacagagtcatcaccaccagcacccgaacctgggccctccccacctacaacaaccacctctacaagcaaatctccagccaatcgggannnagcaccaacgacaacacctacttcggctacagcaccccctgggggtattttgactttaacagattccactgccacttctcaccacgtgactggcagcgactcatcaacaacaactggggattccggcccaagnnnctcaacttcaagctcttcaacatccaggtcaaggaggtcacgacgaatgatggcaccacgaccatcgccaataaccttaccagcacggttcaggtctttacggactcggaataccagctcccgtacgtcctcggctctgcgcaccagggctgcctgcctccgttcccggcggacgtcttcatgattcctcagtacgggtacctgactctgaacaatggcagtcaggccgtgggccgttcctccttctactgcctggagtactttccttctcaaatgctgagaacgggcaacaactttnnnttcagctacacgtttgaggacgtgccttttcacagcagctacgcgcacagccaaagcctggaccggctgatgaaccccctcatcgaccagtacctgtactacctgtctcggactcagaccacgagtggtaccgcaggaaatcggnnnttgcaattttctcaggccgggcctagtagcatggcgaatcaggccaaaaactggctacccgggccctgctaccggcagcaacgcgtctccaagacannnaatcaaaataacaacagcaactttgcctggaccggtgccaccaagtatcatctgaatggcagagactctctggtaaatcccggtcccgctatggcaacccacaaggacgacgaagacaaattttttccgatgagcggagtcttaatatttgggaaacagggagctggaaatagcaacgtggaccttgacaacgttatgataaccnnngaggaagaaattaaaaccaccaacccagtggccacagaannntacggcacggtggccactaacctgcaatcgnnnaacaccgctcctgctacagggaccgtcaacagtcaaggagccttacctggcatggtctggcagnnncgggacgtgtacctgcagggtcctatctgggccaagattcctcacacggacggacactttcatccctcgccgctgatgggaggctttggactgaaacacccgcctcctcagatcctgattaagaatacacctgttcccgcgaatcctccaactaccttcagtccagctaagtttgcgtcgttcatcacgcagtacagcaccggacaggtcagcgtggaaattgaatgggagctgcagaaagaaaacagcaaacgctggaacccagagattcaatacacttccaactacaacaaatctacaaatgtggactttgctgttgacacaaatggcgtttattctgagcctcgccccatcggcacccgttacctcacccgtaatctg

SEQ ID NO: 1204 - protein, 737 aa, Artificial Sequence
  Description of Artificial Sequence: Synthetic polypeptide
  MOD_RES (157)..(157): Thr or Ser
  MOD_RES (168)..(168): Lys or Arg
  MOD_RES (262)..(262): Asn or Ser
  MOD_RES (263)..(263): Ser or His
  MOD_RES (312)..(312): Arg or Lys
  MOD_RES (412)..(412): Glu or Gln
  MOD_RES (460)..(460): Arg or Gln
  MOD_RES (461)..(461): Thr or Glu
  MOD_RES (552)..(552): Asp or Ser
  MOD_RES (556)..(556): Leu or Tyr
  MOD_RES (557)..(557): Asp or Ser
  MOD_RES (563)..(563): Ser or Asn
  MOD_RES (580)..(580): Val or Ile
  MOD_RES (588)..(588): Asn or Ser
  MOD_RES (664)..(664): Ser or Thr
MAADGYLPDWLEDNLSEGIREWWDLKPGAPKPKANQQKQDDGRGLVLPGYKYLGPFNGLDKGEPVNAADAAALEHDKAYDQQLKAGDNPYLRYNHADAEFQERLQEDTSFGGNLGRAVFQAKKRVLEPLGLVEEGAKTAPGKKRPVEQSPQEPDSSXGIGKKGQQPAXKRLNFGQTGDSESVPDPQPLGEPPAAPSGVGSNTMAAGGGAPMADNNEGADGVGNASGNWHCDSTWLGDRVITTSTRTWALPTYNNHLYKQISXXQSGGSTNDNTYFGYSTPWGYFDFNRFHCHFSPRDWQRLINNNWGFRPKXLNFKLFNIQVKEVTTNDGTTTIANNLTSTVQVFTDSEYQLPYVLGSAHQGCLPPFPADVFMIPQYGYLTLNNGSQAVGRSSFYCLEYFPSQMLRTGNNFXFSYTFEDVPFHSSYAHSQSLDRLMNPLIDQYLYYLSRTQTTGGTAGNXXLQFSQAGPSSMANQAKNWLPGPCYRQQRVSKTTNQNNNSNFAWTGATKYHLNGRDSLVNPGVAMATHKDDEDRFFPSSGVLIFGKQGAGNXNVDXXNVMITXEEEIKTTNPVATEEYGXVATNLQSXNTAPQTGTVNSQGALPGMVWQNRDVYLQGPIWAKIPHTDGNFHPSPLMGGFGLKHPPPQILIKNTPVPANPPTTFXPAKFASFITQYSTGQVSVEIEWELQKENSKRWNPEIQYTSNYNKSTNVDFAVDTEGVYSEPRPIGTRYLTRNL

SEQ ID NO: 1205 - DNA, 2211 bp, Artificial Sequence
  Description of Artificial Sequence: Synthetic polynucleotide
  misc_feature (469)..(471): This region may encompass acg or agc
  misc_feature (502)..(504): This region may encompass aaa or aag
  misc_feature (784)..(786): This region may encompass aac or agt
  misc_feature (787)..(789): This region may encompass agc or cac
  misc_feature (934)..(936): This region may encompass aga or aag
  misc_feature (1234)..(1236): This region may encompass gag or cag
  misc_feature (1378)..(1380): This region may encompass cgg or cag
  misc_feature (1381)..(1383): This region may encompass acg or gag
  misc_feature (1654)..(1656): This region may encompass gac or agc
  misc_feature (1666)..(1668): This region may encompass ctt or tac
  misc_feature (1669)..(1671): This region may encompass gac or agc
  misc_feature (1687)..(1689): This region may encompass agt or aac
  misc_feature (1738)..(1740): This region may encompass gtg or atc
  misc_feature (1762)..(1764): This region may encompass gca or agc
  misc_feature (1990)..(1992): This region may encompass agt or acc
atggctgccgatggttatcttccagattggctcgaggacaacctctctgagggcattcgcgagtggtgggacttgaaacctggagccccgaaacccaaagccaaccagcaaaagcaggacgacggccggggtctggtgcttcctggctacaagtacctcggacccttcaacggactcgacaagggggagcccgtcaacgcggcggacgcagcggccctcgagcacgacaaggcctacgaccagcagctcaaagcgggtgacaatccgtacctgcggtataaccacgccgacgccgagtttcaggagcgtctgcaagaagatacgtcttttgggggcaacctcgggcgagcagtcttccaggccaagaagcgggttctcgaacctctcggtctggttgaggaaggcgctaagacggctcctggaaagaagagaccggtagagcaatcaccccaggaaccagactcctctnnnggcatcggcaagaaaggccagcagcccgcgnnnaagagactcaactttgggcagactggcgactcagagtcagtgcccgaccctcaaccactcggagaaccccccgcagccccctctggtgtgggatctaatacaatggctgcaggcggtggcgctccaatggcagacaataacgaaggcgccgacggagtgggtaatgcctcaggaaattggcattgcgattccacatggctgggcgacagagtcatcaccaccagcacccgaacctgggccctccccacctacaacaaccacctctacaagcaaatctccnnnnnncaatcgggaggaagcaccaacgacaacacctacttcggctacagcaccccctgggggtattttgactttaacagattccactgccacttctcaccacgtgactggcagcgactcatcaacaacaactggggattccggcccaagnnnctcaacttcaagctcttcaacatccaggtcaaggaggtcacgacgaatgatggcaccacgaccatcgccaataaccttaccagcacggttcaggtctttacggactcggaataccagctcccgtacgtcctcggctctgcgcaccagggctgcctgcctccgttcccggcggacgtcttcatgattcctcagtacgggtacctgactctgaacaatggcagtcaggccgtgggccgttcctccttctactgcctggagtactttccttctcaaatgctgagaacgggcaacaactttnnnttcagctacacgtttgaggacgtgccttttcacagcagctacgcgcacagccaaagcctggaccggctgatgaaccccctcatcgaccagtacctgtactacctgtctcggactcagaccacgggaggtaccgcaggaaatnnnnnnttgcaattttctcaggccgggcctagtagcatggcgaatcaggccaaaaactggctacccgggccctgctaccggcagcaacgcgtctccaagacaacgaatcaaaataacaacagcaactttgcctggaccggtgccaccaagtatcatctgaatggcagagactctctggtaaatcccggtgtcgctatggcaacccacaaggacgacgaagaccgattttttccgtccagcggagtcttaatatttgggaaacagggagctggaaatnnnaacgtggacnnnnnnaacgttatgataaccnnngaggaagaaattaaaaccaccaacccagtggccacagaagagtacggcnnngtggccactaacctgcaatcgnnnaacaccgctcctcaaacagggaccgtcaacagtcaaggagccttacctggcatggtctggcagaaccgggacgtgtacctgcagggtcctatctgggccaagattcctcacacggacggaaactttcatccctcgccgctgatgggaggctttggactgaaacacccgcctcctcagatcctgattaagaatacacctgttcccgcgaatcctccaactaccttcnnnccagctaagtttgcgtcgttcatcacgcagtacagcaccggacaggtcagcgtggaaattgaatgggagctgcagaaagaaaacagcaaacgctggaacccagagattcaatacacttccaactacaacaaatctacaaatgtggactttgctgttgacacagaaggcgtttattctgagcctcgccccatcggcacccgttacctcacccgtaatctg

SEQ ID NO: 1206 - protein, 738 aa, Artificial Sequence
  Description of Artificial Sequence: Synthetic polypeptide
  MOD_RES (158)..(158): Thr or Ser
  MOD_RES (169)..(169): Lys or Arg
  MOD_RES (564)..(564): Ser or Asn
MAADGYLPDWLEDNLSEGIREWWDLKPGAPKPKANQQKQDDGRGLVLPGYKYLGPFNGLDKGEPVNAADAAALEHDKAYDQQLKAGDNPYLRYNHADAEFQERLQEDTSFGGNLGRAVFQAKKRVLEPLGLVEEGAKTAPGKKRPVEQSPQREPDSSXGIGKKGQQPAXKRLNFGQTGDSESVPDPQPLGEPPAAPSGVGSNTMAAGGGAPMADNNEGADGVGNSSGNWHCDSTWLGDRVITTSTRTWALPTYNNHLYKQISNGTSGGSTNDNTYFGYSTPWGYFDFNRFHCHFSPRDWQRLINNNWGFRPKRLNFKLFNIQVKEVTTNEGTKTIANNLTSTVQVFTDSEYQLPYVLGSAHQGCLPPFPADVFMIPQYGYLTLNNGSQAVGRSSFYCLEYFPSQMLRTGNNFQFSYTFEDVPFHSSYAHSQSLDRLMNPLIDQYLYYLSRTQTTGGTAGTQTLQFSQAGPSSMANQAKNWLPGPCYRQQRVSTTTNQNNNSNFAWTGATKYHLNGRDSLVNPGVAMATHKDDEDRFFPSSGVLIFGKQGAGNDNVDYSNVMITXEEEIKTTNPVATEEYGVVATNLQSANTAPQTGTVNSQGALPGMVWQNRDVYLQGPIWAKIPHTDGNFHPSPLMGGFGLKHPPPQILIKNTPVPADPPTTFNQAKLNSFITQYSTGQVSVEIEWELQKENSKRWNPEIQYTSNYYKSTNVDFAVNTEGVYSEPRPIGTRYLTRNL

SEQ ID NO: 1207 - DNA, 2214 bp, Artificial Sequence
  Description of Artificial Sequence: Synthetic polynucleotide
  misc_feature (472)..(474): This region may encompass acg or agc
  misc_feature (505)..(507): This region may encompass aaa or aga
  misc_feature (1690)..(1692): This region may encompass agc or aac
atggctgccgatggttatcttccagattggctcgaggacaacctctctgagggcattcgcgagtggtgggacctgaaacctggagccccgaaacccaaagccaaccagcaaaagcaggacgacggccggggtctggtgcttcctggctacaagtacctcggacccttcaacggactcgacaagggggagcccgtcaacgcggcggacgcagcggccctcgagcacgacaaggcctacgaccagcagctcaaagcgggtgacaatccgtacctgcggtataatcacgccgacgccgagtttcaggagcgtctgcaagaagatacgtcttttgggggcaacctcgggcgagcagtcttccaggccaagaagcgggttctcgaacctctcggtctggttgaggaaggcgctaagacggctcctggaaagaagagaccggtagagcagtcaccacagcgtgagcccgactcctccnnnggcatcggcaagaaaggccagcagcccgccnnnaagagactcaatttcggtcagactggcgactcagagtcagtccccgaccctcaacctctcggagaacctccagcagcgccctctggtgtgggatctaatacaatggctgcaggcggtggcgcaccaatggcagacaataacgaaggtgccgacggagtgggtaattcctcgggaaattggcattgcgattccacatggctgggcgacagagtcatcaccaccagcacccgaacctgggccctgcccacctacaacaaccacctctacaagcaaatctccaacgggacctcgggaggcagcaccaacgacaacacctactttggctacagcaccccctgggggtattttgactttaacagattccactgccacttctcaccacgtgactggcagcgactcatcaacaacaactggggattccggcccaagagactcaacttcaagctcttcaacatccaggtcaaagaggtcacgacgaatgaaggcaccaagaccatcgccaataacctcaccagcaccgtccaggtgtttacggactcggaataccagctgccgtacgtcctcggctctgcccaccagggctgcctgcctccgttcccggcggacgtcttcatgattcctcagtacggctacctgactctcaacaacggtagtcaggccgtgggacgttcctccttctactgcctggagtacttcccctctcagatgctgagaacgggcaacaactttcaattcagctacactttcgaggacgtgcctttccacagcagctacgcgcacagccagagtttggacaggctgatgaatcctctcatcgaccagtacctgtactacctgtcaagaacccagactacgggaggcacagcgggaacccagacgttgcagttttctcaggccgggcctagcagcatggcgaatcaggccaaaaactggctgcctggaccctgctacagacagcagcgcgtctccacgacaacgaatcaaaacaacaacagcaactttgcctggactggtgccaccaagtatcatctgaacggcagagactctctggtgaatccgggcgtcgccatggcaacccacaaggacgacgaggaccgcttcttcccatccagcggcgtcctcatatttggcaagcagggagctggaaatgacaacgtggactatagcaacgtgatgataaccnnngaggaagaaatcaagaccaccaaccccgtggccacagaagagtatggcgtggtggctactaacctacagtcggcaaacaccgctcctcaaacggggaccgtcaacagccagggagccttacctggcatggtctggcagaaccgggacgtgtacctgcagggtcctatttgggccaagattcctcacacagatggcaactttcacccgtctcctttaatgggcggctttggacttaaacatccgcctcctcagatcctcatcaaaaacactcctgttcctgcggatcctccaacaacgttcaaccaggccaagctgaattctttcatcacgcagtacagcaccggacaagtcagcgtggagatcgagtgggagctgcagaaggagaacagcaagcgctggaacccagagattcagtatacttccaactactacaaatctacaaatgtggactttgctgttaatactgagggtgtttactctgagcctcgccccattggcactcgttacctcacccgtaatctg

SEQ ID NO: 1208 - protein, 738 aa, Artificial Sequence
  Description of Artificial Sequence: Synthetic polypeptide
  MOD_RES (158)..(158): Thr or Ser
  MOD_RES (169)..(169): Arg or Lys
  MOD_RES (315)..(315): Asn or Ser
  MOD_RES (413)..(413): Gln or Glu
  MOD_RES (472)..(472): Asn, Thr or Ser
  MOD_RES (534)..(534): Asp or Glu
  MOD_RES (542)..(542): Ile or Val
  MOD_RES (595)..(595): Ile or Val
MAADGYLPDWLEDNLSEGIREWWDLKPGAPKPKANQQKQDDGRGLVLPGYKYLGPFNGLDKGEPVNAADAAALEHDKAYDQQLKAGDNPYLRYNHADAEFQERLQEDTSFGGNLGRAVFQAKKRVLEPLGLVEEGAKTAPGKKRPVEQSPQREPDSSXGIGKKGQQPAXKRLNFGQTGDSESVPDPQPLGEPPAAPSGVGSNTMAAGGGAPMADNNEGADGVGSSSGNWHCDSTWLGDRVITTSTRTWALPTYNNHLYKQISNGTSGGSTNDNTYFGYSTPWGYFDFNRFHCHFSPRDWQRLINNNWGFRPKRLXFKLFNIQVKEVTQNEGTKTIANNLTSTIQVFTDSEYQLPYVLGSAHQGCLPPFPADVFMIPQYGYLTLNNGSQAVGRSSFYCLEYFPSQMLRTGNNFXFSYTFEDVPFHSSYAHSQSLDRLMNPLIDQYLYYLSRTQTTGGTAGTQTLQFSQAGPSXMANQAKNWLPGPCYRQQRVSTTTSQNNNSNFAWTGATKYHLNGRDSLVNPGVAMATHKDDEXRFFPSSGXLIFGKQGAGKDNVDYSNVMLTSEEEIKTTNPVATEEYGVVADNLQQQNTAPQXGTVNSQGALPGMVWQNRDVYLQGPIWAKIPHTDGNFHPSPLMGGFGLKHPPPQILIKNTPVPADPPTTFNQAKLNSFITQYSTGQVSVEIEWELQKENSKRWNPEIQYTSNYYKSTNVDFAVNTEGVYSEPRPIGTRYLTRNL

SEQ ID NO: 1209 - DNA, 2214 bp, Artificial Sequence
  Description of Artificial Sequence: Synthetic polynucleotide
  misc_feature (472)..(474): This region may encompass acg or agc
  misc_feature (505)..(507): This region may encompass aga or aag
  misc_feature (943)..(945): This region may encompass aac or agc
  misc_feature (1237)..(1239): This region may encompass caa or gaa
  misc_feature (1414)..(1416): This region may encompass aac or acc or agc
  misc_feature (1600)..(1602): This region may encompass gac or gag
  misc_feature (1624)..(1626): This region may encompass atc or gtc
  misc_feature (1783)..(1785): This region may encompass ata or gta
atggctgccgatggttatcttccagattggctcgaggacaacctctctgagggcattcgcgagtggtgggacctgaaacctggagccccgaaacccaaagccaaccagcaaaagcaggacgacggccggggtctggtgcttcctggctacaagtacctcggacccttcaacggactcgacaagggggagcccgtcaacgcggcggacgcagcggccctcgagcacgacaaggcctacgaccagcagctcaaagcgggtgacaatccgtacctgcggtataatcacgccgacgccgagtttcaggagcgtctgcaagaagatacgtcttttgggggcaacctcgggcgagcagtcttccaggccaagaagcgggttctcgaacctctcggtctggttgaggaaggcgctaagacggctcctggaaagaagagaccggtagagcagtcaccacagcgtgagcccgactcctccnnnggcatcggcaagaaaggccagcagcccgccnnnaagagactcaatttcggtcagactggcgactcagagtcagtccccgaccctcaacctctcggagaacctccagcagcgccctctggtgtgggatctaatacaatggctgcaggcggtggcgcaccaatggcagacaataacgaaggtgccgacggagtgggtagttcctcgggaaattggcattgcgattccacatggctgggcgacagagtcatcaccaccagcacccgaacctgggccctgcccacctacaacaaccacctctacaagcaaatctccaacgggacctcgggaggcagcaccaacgacaacacctactttggctacagcaccccctgggggtattttgactttaacagattccactgccacttctcaccacgtgactggcagcgactcatcaacaacaactggggattccggcccaagagactcnnnttcaagctcttcaacatccaggtcaaagaggtcacgcagaatgaaggcaccaagaccatcgccaataacctcaccagcaccatccaggtgtttacggactcggaataccagctgccgtacgtcctcggctctgcccaccagggctgcctgcctccgttcccggcggacgtcttcatgattcctcagtacggctacctgactctcaacaacggtagtcaggccgtgggacgttcctccttctactgcctggagtacttcccctctcagatgctgagaacgggcaacaactttnnnttcagctacactttcgaggacgtgcctttccacagcagctacgcgcacagccagagtttggacaggctgatgaatcctctcatcgaccagtacctgtactacctgtcaagaacccagactacgggaggcacagcgggaacccagacgttgcagttttctcaggccgggcctagcnnnatggcgaatcaggccaaaaactggctgcctggaccctgctacagacagcagcgcgtctccacgacaacgtcgcaaaacaacaacagcaactttgcctggactggtgccaccaagtatcatctgaacggcagagactctctggtgaatccgggcgtcgccatggcaacccacaaggacgacgagnnncgcttcttcccatccagcggcnnnctcatatttggcaagcagggagctggaaaagacaacgtggactatagcaacgtgatgctaaccagcgaggaagaaatcaagaccaccaaccccgtggccacagaagagtatggcgtggtggctgataacctacagcagcaaaacaccgctcctcaannngggaccgtcaacagccagggagccttacctggcatggtctggcagaaccgggacgtgtacctgcagggtcctatttgggccaagattcctcacacagatggcaactttcacccgtctcctttaatgggcggctttggacttaaacatccgcctcctcagatcctcatcaaaaacactcctgttcctgcggatcctccaacaacgttcaaccaggccaagctgaattctttcatcacgcagtacagcaccggacaagtcagcgtggagatcgagtgggagctgcagaaggagaacagcaagcgctggaacccagagattcagtatacttccaactactacaaatctacaaatgtggactttgctgttaatactgagggtgtttactctgagcctcgccccattggcactcgttacctcacccgtaatctg

SEQ ID NO: 1210 - protein, 738 aa, Artificial Sequence
  Description of Artificial Sequence: Synthetic polypeptide
  MOD_RES (169)..(169): Arg or Lys
  MOD_RES (315)..(315): Asn or Ser
  MOD_RES (534)..(534): Asp or Glu
  MOD_RES (542)..(542): Ile or Val
MAADGYLPDWLEDNLSEGIREWWDLKPGAPKPKANQQKQDDGRGLVLPGYKYLGPFNGLDKGEPVNAADAAALEHDKAYDQQLKAGDNPYLRYNHADAEFQERLQEDTSFGGNLGRAVFQAKKRVLEPLGLVEEGAKTAPGKKRPVEPSPQRSPDSSTGIGKKGQQPAXKRLNFGQTGDSESVPDPQPIGEPPAAPSGVGSGTMAAGGGAPMADNNEGADGVGSSSGNWHCDSTWLGDRVITTSTRTWALPTYNNHLYKQISNGTSGGSTNDNTYFGYSTPWGYFDFNRFHCHFSPRDWQRLINNNWGFRPKRLXFKLFNIQVKEVTQNEGTKTIANNLTSTIQVFTDSEYQLPYVLGSAHQGCLPPFPADVFMIPQYGYLTLNNGSQAVGRSSFYCLEYFPSQMLRTGNNFEFSYTFEDVPFHSSYAHSQSLDRLMNPLIDQYLYYLSRTQSTGGTAGTQQLLFSQAGPSNMSAQAKNWLPGPCYRQQRVSTTLSQNNNSNFAWTGATKYHLNGRDSLVNPGVAMATHKDDEXRFFPSSGXLMFGKQGAGKDNVDYSNVMLTSEEEIKTTNPVATEQYGVVADNLQQQNTAPIVGAVNSQGALPGMVWQNRDVYLQGPIWAKIPHTDGNFHPSPLMGGFGLKHPPPQILIKNTPVPADPPTTFNQAKLNSFITQYSTGQVSVEIEWELQKENSKRWNPEIQYTSNYYKSTNVDFAVNTEGVYSEPRPIGTRYLTRNL

SEQ ID NO: 1211 - DNA, 2214 bp, Artificial Sequence
  Description of Artificial Sequence: Synthetic polynucleotide
  misc_feature (505)..(507): This region may encompass aga or aaa
  misc_feature (943)..(945): This region may encompass aac or agc
  misc_feature (1600)..(1602): This region may encompass gac or gag
  misc_feature (1624)..(1626): This region may encompass atc or gtc
atggctgccgatggttatcttccagattggctcgaggacaacctctctgagggcattcgcgagtggtgggacctgaaacctggagccccgaaacccaaagccaaccagcaaaagcaggacgacggccggggtctggtgcttcctggctacaagtacctcggacccttcaacggactcgacaagggggagcccgtcaacgcggcggacgcagcggccctcgagcacgacaaggcctacgaccagcagctcaaagcgggtgacaatccgtacctgcggtataatcacgccgacgccgagtttcaggagcgtctgcaagaagatacgtcttttgggggcaacctcgggcgagcagtcttccaggccaagaagcgggttctcgaacctctcggtctggttgaggaaggcgctaagacggctcctggaaagaagagaccggtagagccgtcaccacagcgttcccccgactcctccacgggcatcggcaagaaaggccagcagcccgccnnnaagagactcaatttcggtcagactggcgactcagagtcagtccccgaccctcaacctatcggagaacctccagcagcgccctctggtgtgggatctggtacaatggctgcaggcggtggcgcaccaatggcagacaataacgaaggtgccgacggagtgggtagttcctcgggaaattggcattgcgattccacatggctgggcgacagagtcatcaccaccagcacccgaacctgggccctgcccacctacaacaaccacctctacaagcaaatctccaacgggacctcgggaggcagcaccaacgacaacacctactttggctacagcaccccctgggggtattttgactttaacagattccactgccacttctcaccacgtgactggcagcgactcatcaacaacaactggggattccggcccaagagactcnnnttcaagctcttcaacatccaggtcaaagaggtcacgcagaatgaaggcaccaagaccatcgccaataacctcaccagcaccatccaggtgtttacggactcggaataccagctgccgtacgtcctcggctctgcccaccagggctgcctgcctccgttcccggcggacgtcttcatgattcctcagtacggctacctgactctcaacaacggtagtcaggccgtgggacgttcctccttctactgcctggagtacttcccctctcagatgctgagaacgggcaacaactttgagttcagctacactttcgaggacgtgcctttccacagcagctacgcgcacagccagagtttggacaggctgatgaatcctctcatcgaccagtacctgtactacctgtcaagaacccagtctacgggaggcacagcgggaacccagcagttgctgttttctcaggccgggcctagcaacatgtcggctcaggccaaaaactggctgcctggaccctgctacagacagcagcgcgtctccacgacactgtcgcaaaacaacaacagcaactttgcctggactggtgccaccaagtatcatctgaacggcagagactctctggtgaatccgggcgtcgccatggcaacccacaaggacgacgagnnncgcttcttcccatccagcggcnnnctcatgtttggcaagcagggagctggaaaagacaacgtggactatagcaacgtgatgctaaccagcgaggaagaaatcaagaccaccaaccccgtggccacagaacagtatggcgtggtggctgataacctacagcagcaaaacaccgctcctattgtgggggccgtcaacagccagggagccttacctggcatggtctggcagaaccgggacgtgtacctgcagggtcctatttgggccaagattcctcacacagatggcaactttcacccgtctcctttaatgggcggctttggacttaaacatccgcctcctcagatcctcatcaaaaacactcctgttcctgcggatcctccaacaacgttcaaccaggccaagctgaattctttcatcacgcagtacagcaccggacaagtcagcgtggagatcgagtgggagctgcagaaggagaacagcaagcgctggaacccagagattcagtatacttccaactactacaaatctacaaatgtggactttgctgttaatactgagggtgtttactctgagcctcgccccattggcactcgttacctcacccgtaatctg

SEQ ID NO: 1212 - protein, 738 aa, Artificial Sequence
  Description of Artificial Sequence: Synthetic polypeptide
  MOD_RES (471)..(471): Ser or Asn
MAADGYLPDWLEDNLSEGIREWWDLKPGAPKPKANQQKQDDGRGLVLPGYKYLGPFNGLDKGEPVNAADAAALEHDKAYDQQLKAGDNPYLRYNHADAEFQERLQEDTSFGGNLGRAVFQAKKRVLEPLGLVEEGAKTAPGKKRPVEPSPQRSPDSSTGIGKKGQQPAKKRLNFGQTGDSESVPDPQPIGEPPAGPSGLGSGTMAAGGGAPMADNNEGADGVGSSSGNWHCDSTWLGDRVITTSTRTWALPTYNNHLYKQISNGTSGGSTNDNTYFGYSTPWGYFDFNRFHCHFSPRDWQRLINNNWGFRPKRLNFKLFNIQVKEVTQNEGTKTIANNLTSTIQVFTDSEYQLPYVLGSAHQGCLPPFPADVFMIPQYGYLTLNNGSQAVGRSSFYCLEYFPSQMLRTGNNFEFSYTFEDVPFHSSYAHSQSLDRLMNPLIDQYLYYLSRTQSTGGTAGTQQLLFSQAGPXNMSAQAKNWLPGPCYRQQRVSTTLSQNNNSNFAWTGATKYHLNGRDSLVNPGVAMATHKDDEERFFPSSGVLMFGKQGAGKDNVDYSSVMLTSEEEIKTTNPVATEQYGVVADNLQQQNTAPIVGAVNSQGALPGMVWQNRDVYLQGPIWAKIPHTDGNFHPSPLMGGFGLKHPPPQILIKNTPVPADPPTTFSQAKLASFITQYSTGQVSVEIEWELQKENSKRWNPEIQYTSNYYKSTNVDFAVNTEGTYSEPRPIGTRYLTRNL

SEQ ID NO: 1213 - DNA, 2214 bp, Artificial Sequence
  Description of Artificial Sequence: Synthetic polynucleotide
  misc_feature (1411)..(1413): This region may encompass agt or aat
atggctgccgatggttatcttccagattggctcgaggacaacctctctgagggcattcgcgagtggtgggacttgaaacctggagccccgaaacccaaagccaaccagcaaaagcaggacgacggccggggtctggtgcttcctggctacaagtacctcggacccttcaacggactcgacaagggggagcccgtcaacgcggcggacgcagcggccctcgagcacgacaaggcctacgaccagcagctcaaagcgggtgacaatccgtacctgcggtataaccacgccgacgccgagtttcaggagcgtctgcaagaagatacgtcttttgggggcaacctcgggcgagcagtcttccaggccaagaagcgggttctcgaacctctcggtctggttgaggaaggcgctaagacggctcctggaaagaagagaccggtagagccatcaccccagcgttctccagactcctctacgggcatcggcaagaaaggccagcagcccgcgaaaaagagactcaactttgggcagactggcgactcagagtcagtgcccgaccctcaaccaatcggagaaccccccgcaggcccctctggtctgggatctggtacaatggctgcaggcggtggcgctccaatggcagacaataacgaaggcgccgacggagtgggtagttcctcaggaaattggcattgcgattccacatggctgggcgacagagtcatcaccaccagcacccgaacctgggccctccccacctacaacaaccacctctacaagcaaatctccaacgggacttcgggaggaagcaccaacgacaacacctacttcggctacagcaccccctgggggtattttgactttaacagattccactgccacttctcaccacgtgactggcagcgactcatcaacaacaactggggattccggcccaagagactcaacttcaagctcttcaacatccaggtcaaggaggtcacgcagaatgaaggcaccaagaccatcgccaataaccttaccagcacgattcaggtctttacggactcggaataccagctcccgtacgtcctcggctctgcgcaccagggctgcctgcctccgttcccggcggacgtcttcatgattcctcagtacgggtacctgactctgaacaatggcagtcaggccgtgggccgttcctccttctactgcctggagtactttccttctcaaatgctgagaacgggcaacaactttgagttcagctacacgtttgaggacgtgccttttcacagcagctacgcgcacagccaaagcctggaccggctgatgaaccccctcatcgaccagtacctgtactacctgtctcggactcagtccacgggaggtaccgcaggaactcagcagttgctattttctcaggccgggcctnnnaacatgtcggctcaggccaaaaactggctacccgggccctgctaccggcagcaacgcgtctccacgacactgtcgcaaaataacaacagcaactttgcctggaccggtgccaccaagtatcatctgaatggcagagactctctggtaaatcccggtgtcgctatggcaacccacaaggacgacgaagagcgattttttccgtccagcggagtcttaatgtttgggaaacagggagctggaaaagacaacgtggactatagcagcgttatgctaaccagtgaggaagaaattaaaaccaccaacccagtggccacagaacagtacggcgtggtggccgataacctgcaacagcaaaacaccgctcctattgtaggggccgtcaacagtcaaggagccttacctggcatggtctggcagaaccgggacgtgtacctgcagggtcctatctgggccaagattcctcacacggacggaaactttcatccctcgccgctgatgggaggctttggactgaaacacccgcctcctcagatcctgattaagaatacacctgttcccgcggatcctccaactaccttcagtcaagctaagctggcgtcgttcatcacgcagtacagcaccggacaggtcagcgtggaaattgaatgggagctgcagaaagaaaacagcaaacgctggaacccagagattcaatacacttccaactactacaaatctacaaatgtggactttgctgttaacacagaaggcacttattctgagcctcgccccatcggcacccgttacctcacccgtaatctg

SEQ ID NO: 1214 - protein, 737 aa, Artificial Sequence
  Description of Artificial Sequence: Synthetic polypeptide
  MOD_RES (148)..(148): Pro or Gln
  MOD_RES (169)..(169): Lys or Arg
  MOD_RES (314)..(314): Arg or Asn
  MOD_RES (466)..(466): Tyr or His
  MOD_RES (563)..(563): Asn or Ser
  MOD_RES (580)..(580): Val or Ile
  MOD_RES (588)..(588): Ala or Ser
MAADGYLPDWLEDNLSEGIREWWDLKPGAPKPKANQQKQDDGRGLVLPGYKYLGPFNGLDKGEPVNAADAAALEHDKAYDQQLKAGDNPYLRYNHADAEFQERLQEDTSFGGNLGRAVFQAKKRVLEPLGLVEEGAKTAPGKKRPVEXSPQRSPDSSTGIGKKGQQPAXKRLNFGQTGDSESVPDPQPLGEPPAAPSGVGSGTMAAGGGAPMADNNEGADGVGNASGNWHCDSTWLGDRVITTSTRTWALPTYNNHLYKQISSQSAGSTNDNTYFGYSTPWGYFDFNRFHCHFSPRDWQRLINNNWGFRPKKLXFKLFNIQVKEVTTNDGVTTIANNLTSTVQVFSDSEYQLPYVLGSAHQGCLPPFPADVFMIPQYGYLTLNNGSQSVGRSSFYCLEYFPSQMLRTGNNFEFSYTFEDVPFHSSYAHSQSLDRLMNPLIDQYLYYLARTQSTTGGTAGNRELQFXQAGPSTMAEQAKNWLPGPCYRQQRVSKTLDQNNNSNFAWTGATKYHLNGRNSLVNPGVAMATHKDDEDRFFPSSGVLIFGKTGAANKTTLENVLMTXEEEIKTTNPVATEEYGXVSSNLQSXNTAPQTQTVNSQGALPGMVWQNRDVYLQGPIWAKIPHTDGNFHPSPLMGGFGLKHPPPQILIKNTPVPANPPEVFTPAKFASFITQYSTGQVSVEIEWELQKENSKRWNPEIQYTSNYDKSTNVDFAVDSEGVYSEPRPIGTRYLTRNL

SEQ ID NO: 1215 - DNA, 2211 bp, Artificial Sequence
  Description of Artificial Sequence: Synthetic polynucleotide
  misc_feature (442)..(444): This region may encompass ccg or cag
  misc_feature (505)..(507): This region may encompass aaa or aga
  misc_feature (940)..(942): This region may encompass cgg or aac
  misc_feature (1396)..(1398): This region may encompass tac or cac
  misc_feature (1687)..(1689): This region may encompass aat or agt
  misc_feature (1738)..(1740): This region may encompass gta or ata
  misc_feature (1762)..(1764): This region may encompass gct or tct
atggctgccgatggttatcttccagattggctcgaggacaacctctctgagggcattcgcgagtggtgggacctgaaacctggagccccgaaacccaaagccaaccagcaaaagcaggacgacggccggggtctggtgcttcctggctacaagtacctcggacccttcaacggactcgacaagggggagcccgtcaacgcggcggacgcagcggccctcgagcacgacaaggcctacgaccagcagctcaaagcgggtgacaatccgtacctgcggtataaccacgccgacgccgagtttcaggagcgtctgcaagaagatacgtcatttgggggcaacctcgggcgagcagtcttccaggccaagaagcgggttctcgaacctctcggtctggttgaggaaggcgctaagacggctcctggaaagaagagaccggtagagnnntcacctcagcgttcccccgactcctccacgggcatcggcaagaaaggccagcagcccgccnnnaagagactcaatttcggtcagactggcgactcagagtcagtccccgaccctcaacctctcggagaacctccagcagcgccctctggtgtgggatctggtacaatggctgcaggcggtggcgcaccaatggcagacaataacgaaggtgccgacggagtgggtaatgcctcaggaaattggcattgcgattccacatggctgggcgacagagtcattaccaccagcacccgaacctgggccctgcccacctacaacaaccacctctacaagcaaatctccagtcaaagtgcaggtagtaccaacgacaacacctacttcggctacagcaccccctgggggtattttgactttaacagattccactgccacttctcaccacgtgactggcagcgactcatcaacaacaactggggattccggcccaagaagctgnnnttcaagctcttcaacatccaggtcaaggaggtcacgacgaatgacggcgttacgaccatcgctaataaccttaccagcacggttcaggtattctcggactcggaataccagctgccgtacgtcctcggctctgcgcaccagggctgcctgcctccgttcccggcggacgtcttcatgattcctcagtacggctacctgactctcaacaatggcagtcagtctgtgggacgttcctccttctactgcctggagtacttcccctctcagatgctgagaacgggcaacaactttgagttcagctacaccttcgaggacgtgcctttccacagcagctacgcacacagccagagcctggaccggctgatgaatcccctcatcgaccagtacttgtactacctggccagaacacagagtaccacaggaggcacagctggcaatcgggaactgcagtttnnncaggccgggccttcaactatggccgaacaagccaagaattggttacctggaccttgctaccggcaacaaagagtctccaaaacgctggatcaaaacaacaacagcaactttgcttggactggtgccaccaaatatcacctgaacggcagaaactcgttggttaatcccggcgtcgccatggcaactcacaaggacgacgaggaccgctttttcccatccagcggagtcctgatttttggaaaaactggagcagctaacaaaactacattggaaaatgtgttaatgacannngaagaagaaattaaaactactaatcctgtagccacggaagaatacgggnnngtcagcagcaacttacaatcgnnnaatactgcaccccagacacaaactgtcaacagccagggagccttacctggcatggtctggcagaaccgggacgtgtacctgcagggtcccatctgggccaagattcctcacacggatggcaactttcacccgtctcctttgatgggcggctttggacttaaacatccgcctcctcagatcctgatcaagaacactcccgttcccgctaatcctccggaggtgtttactcctgccaagtttgcttcgttcatcacacagtacagcaccggacaagtcagcgtggaaatcgagtgggagctgcagaaggaaaacagcaagcgctggaacccggagattcagtacacctccaactatgataagtcgactaatgtggactttgccgttgacagcgagggtgtttactctgagcctcgccctattggcactcgttacctcacccgtaatctg

SEQ ID NO: 1216 - protein, 735 aa, Artificial Sequence
  Description of Artificial Sequence: Synthetic polypeptide
  MOD_RES (162)..(162): Ser or Thr
  MOD_RES (168)..(168): Lys or Arg
  MOD_RES (224)..(224): Ala or Ser
  MOD_RES (310)..(310): Arg or Lys
  MOD_RES (410)..(410): Thr or Gln
  MOD_RES (446)..(446): Ser or Asn
  MOD_RES (461)..(461): Gln or Leu
  MOD_RES (471)..(471): Ala or Ser
  MOD_RES (708)..(708): Ala or Thr
MAADGYLPDWLEDNLSEGIREWWDLKPGAPKPKANQQKQDDGRGLVLPGYKYLGPFNGLDKGEPVNAADAAALEHDKAYDQQLKAGDNPYLRYNHADAEFQERLQEDTSFGGNLGRAVFQAKKRVLEPLGLVEEGAKTAPGKKRPVEQSPQEPDSSSGIGKXGQQPAXKRLNFGQTGDSESVPDPQPLGEPPAAPSGVGSNTMASGGGAPMADNNEGADGVGNXSGNWHCDSTWLGDRVITTSTRTWALPTYNNHLYKQISSQSGASNDNHYFGYSTPWGYFDFNRFHCHFSPRDWQRLINNNWGFRPKXLNFKLFNIQVKEVTTNDGTTTIANNLTSTVQVFTDSEYQLPYVLGSAHQGCLPPFPADVFMIPQYGYLTLNNGSQAVGRSSFYCLEYFPSQMLRTGNNFXFSYTFEDVPFHSSYAHSQSLDRLMNPLIDQYLYYLXRTQTTSGTAQNRELXFSQAGPSSMXNQAKNWLPGPCYRQQRVSKTANDNNNSNFAWTGATKYHLNGRDSLVNPGPAMASHKDDEDKFFPMSGVLIFGKQGAGASNVDLDNVMITDEEEIKTTNPVATEQYGTVATNLQSSNTAPATGTVNSQGALPGMVWQDRDVYLQGPIWAKIPHTDGHFHPSPLMGGFGLKHPPPQILIKNTPVPANPPTTFSPAKFASFITQYSTGQVSVEIEWELQKENSKRWNPEIQYTSNYNKSXNVDFTVDTNGVYSEPRPIGTRYLTRNL

SEQ ID NO: 1217 - DNA, 2205 bp, Artificial Sequence
  Description of Artificial Sequence: Synthetic polynucleotide
  misc_feature (484)..(486): This region may encompass tca or aca
  misc_feature (502)..(504): This region may encompass aaa or aga
  misc_feature (670)..(672): This region may encompass gcc or tcc
  misc_feature (928)..(930): This region may encompass aga or aaa
  misc_feature (1228)..(1230): This region may encompass acc or cag
  misc_feature (1336)..(1338): This region may encompass agc or aac
  misc_feature (1381)..(1383): This region may encompass cag or ctg
  misc_feature (1411)..(1413): This region may encompass gct or tct
  misc_feature (2122)..(2124): This region may encompass gcc or acc
atggctgccgatggttatcttccagattggctcgaggacaacctctctgagggcattcgcgagtggtgggacttgaaacctggagccccgaaacccaaagccaaccagcaaaagcaggacgacggccggggtctggtgcttcctggctacaagtacctcggacccttcaacggactcgacaagggggagcccgtcaacgcggcggatgcagcggccctcgagcacgacaaggcctacgaccagcagctcaaagcgggtgacaatccgtacctgcggtataaccacgccgacgccgagtttcaggagcgtctgcaagaagatacgtcttttgggggcaacctcgggcgagcagtcttccaggccaagaagagggttctcgaacctcttggtctggttgaggaaggtgctaagacggctcctggaaagaaacgtccggtagagcagtcgccacaagagccagactcctcctcgggcattggcaagnnnggccagcagcccgctnnnaagagactcaattttggtcagactggcgactcagagtcagtccccgacccacaacctctcggagaacctccagcagccccctctggtgtgggatctaatacaatggcttcaggcggtggcgcaccaatggcagacaataacgaaggcgccgacggagtgggtaatnnntcaggaaattggcattgcgattccacatggctgggcgacagagtcatcaccaccagcacccgaacatgggccttgcccacctataacaaccacctctacaagcaaatctccagtcaatcaggggccagcaacgacaaccactacttcggctacagcaccccctgggggtattttgatttcaacagattccactgccatttctcaccacgtgactggcagcgactcatcaacaacaattggggattccggcccaagnnnctcaacttcaagctcttcaacatccaagtcaaggaggtcacgacgaatgatggcaccacgaccatcgctaataaccttaccagcacggttcaagtcttcacggactcggagtaccagttgccgtacgtcctcggctctgcgcaccagggctgcctccctccgttcccggcggacgtgttcatgattccgcagtacggctacctaacgctcaacaatggcagccaggcagtgggacggtcatccttttactgcctggaatatttcccatcgcagatgctgagaacgggcaataactttnnnttcagctacaccttcgaggacgtgcctttccacagcagctacgcgcacagccagagcctggaccggctgatgaatcctctcatcgaccagtacctgtattacctgnnnagaactcagactacgtccggaactgcccaaaacagggagttgnnntttagccaggcgggtccatctagcatgnnnaatcaggccaaaaactggctacctggaccctgttaccggcagcagcgcgtttctaaaacagcaaatgacaacaacaacagcaactttgcctggactggtgctacaaaatatcaccttaatgggcgtgattctttagtcaaccctggccctgctatggcctcacacaaagacgacgaagacaagttctttcccatgagcggtgtcttgatttttggaaagcagggcgccggagcttcaaacgttgatttggacaatgtcatgatcacagacgaagaggaaatcaaaaccactaaccccgtggccaccgaacaatatgggactgtggcaaccaatctccagagcagcaacacagcccctgcgaccggaactgtgaattctcagggagccttacctggaatggtgtggcaagacagagacgtatacctgcagggtcctatttgggccaaaattcctcacacggatggacactttcacccgtctcctctcatgggcggctttggacttaagcacccgcctcctcagatcctcatcaaaaacacgcctgttcctgcgaatcctccgacaacgttttcgcctgcaaagtttgcttcattcatcacccagtattccacaggacaagtgagcgtggagattgaatgggagctgcagaaagaaaacagcaaacgctggaatcccgaaatacagtatacatctaactataataaatctnnnaacgttgatttcactgtggacaccaatggagtttatagtgagcctcgccccattggcacccgttacctcacccgtaacctg

SEQ ID NO: 1218 - protein, 735 aa, Artificial Sequence
  Description of Artificial Sequence: Synthetic polypeptide
  MOD_RES (42)..(42): Gly or Ser
  MOD_RES (168)..(168): Arg or Lys
  MOD_RES (310)..(310): Lys or Arg
  MOD_RES (410)..(410): Thr or Gln
  MOD_RES (446)..(446): Ser or Arg
  MOD_RES (461)..(461): Gln or Leu
  MOD_RES (471)..(471): Ala or Ser
  MOD_RES (475)..(475): Lys or Arg
  MOD_RES (504)..(504): Gly or Ala
  MOD_RES (539)..(539): Val or Asn
MAADGYLPDWLEDNLSEGIREWWDLKPGAPQPKANQQHQDDXRGLVLPGYKYLGPFNGLDKGEPVNEADAAALEHDKAYDQQLKAGDNPYLKYNHADAEFQERLQEDTSFGGNLGRAVFQAKKRVLEPLGLVEEAAKTAPGKKRPVEQSPQEPDSSSGIGKSGQQPAXKRLNFGQTGDSESVPDPQPLGEPPAAPSGVGSNTMASGGGAPMADNNEGADGVGNSSGNWHCDSTWLGDRVITTSTRTWALPTYNNHLYKQISSQSGASNDNHYFGYSTPWGYFDFNRFHCHFSPRDWQRLINNNWGFRPKXLNFKLFNIQVKEVTQNDGTTTIANNLTSTVQVFTDSEYQLPYVLGSAHQGCLPPFPADVFMIPQYGYLTLNNGSQAVGRSSFYCLEYFPSQMLRTGNNFXFSYTFEDVPFHSSYAHSQSLDRLMNPLIDQYLYYLXRTQTTSGTTQQSRLXFSQAGPSSMXQQAXNWLPGPCYRQQRVSKTANDNNNSNFAWTXATKYHLNGRDSLVNPGPAMASHKDDEEKFFPMHGXLIFGKQGTGASNVDLDNVMITDEEEIRTTNPVATEQYGTVATNLQSSNTAPATGTVNSQGALPGMVWQDRDVYLQGPIWAKIPHTDGHFHPSPLMGGFGLKHPPPQILIKNTPVPANPPTTFSPAKFASFITQYSTGQVSVEIEWELQKENSKRWNPEIQYTSNYNKSVNVDFTVDTNGVYSEPRPIGTRYLTRNL

SEQ ID NO: 1219 - DNA, 2205 bp, Artificial Sequence
  Description of Artificial Sequence: Synthetic polynucleotide
  misc_feature (124)..(126): This region may encompass ggt or agt
  misc_feature (502)..(504): This region may encompass aga or aaa
  misc_feature (928)..(930): This region may encompass aaa or aga
  misc_feature (1228)..(1230): This region may encompass aca or cag
  misc_feature (1336)..(1338): This region may encompass agc or aga
  misc_feature (1381)..(1383): This region may encompass caa or ctc
  misc_feature (1411)..(1413): This region may encompass gct or tct
  misc_feature (1423)..(1425): This region may encompass aaa or aga
  misc_feature (1510)..(1512): This region may encompass ggg or gcg
  misc_feature (1615)..(1617): This region may encompass gtt or gac
atggctgctgacggttatcttccagattggctcgaggacaacctttctgaaggcattcgtgagtggtgggatctgaaacctggagcccctcaacccaaagcgaaccaacaacaccaggacgacnnncggggtcttgtgcttccgggttacaaatacctcggaccctttaacggactcgacaaaggagagccggtcaacgaggcggacgcggcagccctcgaacacgacaaagcttacgaccagcagctcaaggccggtgacaacccgtacctcaagtacaaccacgccgacgccgagtttcaggagcgtcttcaagaagatacgtcttttgggggcaaccttggcagagcagtcttccaggccaaaaagagggtccttgagcctcttggtctggttgaggaagcagctaaaacggctcctggaaagaagaggcctgtagaacagtctcctcaggaaccggactcatcatctggtattggcaaatcgggccaacagcctgccnnnaaaagactaaatttcggtcagactggagactcagagtcagtcccagaccctcaacctctcggagaaccaccagcagccccctcaggtgtgggatctaatacaatggcttcaggcggtggcgcaccaatggcagacaataacgagggtgccgatggagtgggtaattcctcaggaaattggcattgcgattccacatggctgggcgacagagtcatcaccaccagcaccagaacctgggccctgcccacttacaacaaccatctctacaagcaaatctccagccaatcaggagcttcaaacgacaaccactactttggctacagcaccccttgggggtattttgactttaacagattccactgccacttctcaccacgtgactggcagcgactcattaacaacaactggggattccggcccaagnnnctcaacttcaagctcttcaacatccaagttaaagaggtcacgcagaacgatggcacgacgactattgccaataaccttaccagcacggttcaagtgtttacggactcggagtatcagctcccgtacgtgctcgggtcggcgcaccaaggctgtctcccgccgtttccagcggacgtcttcatgatccctcagtatggatacctcaccctgaacaacggaagtcaagcggtgggacgctcatccttttactgcctggagtacttcccttcgcagatgctaaggactggaaataacttcnnnttcagctataccttcgaggatgtaccttttcacagcagctacgctcacagccagagtttggatcgcttgatgaatcctcttattgatcagtatctgtactacctgnnnagaacgcaaacaacctctggaacaacccaacaatcacggctgnnntttagccaggctgggccttcgtctatgnnncagcaggccnnnaattggctacctgggccctgctaccggcaacagagagtttcaaagactgctaacgacaacaacaacagtaactttgcttggacannngccaccaaatatcatctcaatggccgcgactcgctggtgaatccaggaccagctatggccagtcacaaggacgatgaagaaaaatttttccctatgcacggcnnnctaatatttggcaaacaagggacaggggcaagtaacgtagatttagataatgtaatgattacggatgaagaagagattcgtaccaccaatcctgtggcaacagagcagtatggaactgtggcaactaacttgcagagctcaaatacagctcccgcgactggaactgtcaatagtcagggggccttacctggcatggtgtggcaagatcgtgacgtgtaccttcaaggacctatctgggcaaagattcctcacacggatggacactttcatccttctcctctgatgggaggctttggactgaaacatccgcctcctcaaatcttgatcaaaaatactccggtaccggcaaatcctccgacgactttcagcccggccaagtttgcttcatttatcactcagtactccactggacaggtcagcgtggaaattgagtgggagctacagaaagaaaacagcaaacgttggaatccagagattcagtacacttccaactacaacaagtctgttaatgtggactttactgtagacactaatggtgtttatagtgaacctcgccctattggaacccggtatctcacacgaaacttg

SEQ ID NO: 1220 - protein, 736 aa, Artificial Sequence; identical to SEQ ID NO: 928
  Description of Artificial Sequence: Synthetic polypeptide

SEQ ID NO: 1221 - protein, 736 aa, Artificial Sequence; identical to SEQ ID NO: 929
  Description of Artificial Sequence: Synthetic polypeptide

SEQ ID NO: 1222 - protein, 736 aa, Artificial Sequence; identical to SEQ ID NO: 930
  Description of Artificial Sequence: Synthetic polypeptide

SEQ ID NO: 1223 - protein, 736 aa, Artificial Sequence; identical to SEQ ID NO: 931
  Description of Artificial Sequence: Synthetic polypeptide

SEQ ID NO: 1224 - protein, 736 aa, Artificial Sequence; identical to SEQ ID NO: 932
  Description of Artificial Sequence: Synthetic polypeptide

SEQ ID NO: 1225 - protein, 736 aa, Artificial Sequence; identical to SEQ ID NO: 933
  Description of Artificial Sequence: Synthetic polypeptide

SEQ ID NO: 1226 - protein, 736 aa, Artificial Sequence; identical to SEQ ID NO: 934
  Description of Artificial Sequence: Synthetic polypeptide

SEQ ID NO: 1227 - protein, 736 aa, Artificial Sequence; identical to SEQ ID NO: 935
  Description of Artificial Sequence: Synthetic polypeptide

SEQ ID NO: 1228 - DNA, 2211 bp, Artificial Sequence; identical to SEQ ID NO: 936
  Description of Artificial Sequence: Synthetic polynucleotide

SEQ ID NO: 1229 - protein, 738 aa, Artificial Sequence; identical to SEQ ID NO: 16
  Description of Artificial Sequence: Synthetic polypeptide

SEQ ID NO: 1230 - protein, 738 aa, Artificial Sequence; identical to SEQ ID NO: 16
  Description of Artificial Sequence: Synthetic polypeptide

SEQ ID NO: 1231 - protein, 738 aa, Artificial Sequence
  Description of Artificial Sequence: Synthetic polypeptide
  MOD_RES (157)..(157): Ser or Thr
  MOD_RES (169)..(169): Lys or Arg
  MOD_RES (457)..(457): Ala or Gly
  MOD_RES (463)..(463): Gln or Ala
  MOD_RES (508)..(508): Thr or Ala
  MOD_RES (510)..(510): Tyr or Phe
  MOD_RES (511)..(511): His or Lys
  MOD_RES (558)..(558): Gln or Asn
  MOD_RES (585)..(585): Asn or His
  MOD_RES (587)..(587): Ser or Ala
MAADGYLPDWLEDNLSEGIREWWDLKPGAPKPKANQQKQDDGRGLVLPGYKYLGPFNGLDKGEPVNAADAAALEHDKAYDQQLKAGDNPYLRYNHADAEFQERLQEDTSFGGNLGRAVFQAKKRVLEPLGLVEEGAKTAPGKKRPVEQSPQEPDSSXLGIGKTGQQPAXKRLNFGQTGDSESVPDPQPLGEPPAAPSGVGSNTMASGGGAPMADNNEGADGVGNSSGNWHCDSTWLGDRVITTSTRTWALPTYNNHLYKQISNGTSGGSTNDNTYFGYSTPWGYFDFNRFHCHFSPRDWQRLINNNWGFRPKRLNFKLFNIQVKEVTTNEGTKTIANNLTSTVQVFTDSEYQLPYVLGSAHQGCLPPFPADVFMIPQYGYLTLNNGSQAVGRSSFYCLEYFPSQMLRTGNNFQFSYTFEDVPFHSSYAHSQSLDRLMNPLIDQYLYYLSRTQTTGTXGTQTLXFSQAGPSSMANQARNWVPGPCYRQQRVSTTTNQNNNSNFAWTGAXKXXLNGRDSLMNPGVAMASHKDDEDRFFPSSGVLIFGKQGAGNDNVDYSXVMITNEEEIKTTNPVATEEYGAVATNXQXLANTQAQTGLVHNQGVLPGMVWQNRDVYLQGPIWAKIPHTDGNFHPSPLMGGFGLKHPPPQILIKNTPVPADPPTTFNQAKLNSFITQYSTGQVSVEIEWELQKENSKRWNPEIQYTSNYYKSTNVDFAVNTEGVYSEPRPIGTRYLTRNL

SEQ ID NO: 1232 - DNA, 2211 bp, Artificial Sequence
  Description of Artificial Sequence: Synthetic polynucleotide
  misc_feature (469)..(471): This region may encompass tcg or acg
  misc_feature (502)..(504): This region may encompass aaa or aga
  misc_feature (1366)..(1368): This region may encompass gca or gga
  misc_feature (1384)..(1386): This region may encompass caa or gca
  misc_feature (1519)..(1521): This region may encompass acc or gcc
  misc_feature (1525)..(1527): This region may encompass tat or ttt
  misc_feature (1528)..(1530): This region may encompass cac or aaa
  misc_feature (1669)..(1671): This region may encompass caa or aac
  misc_feature (1750)..(1752): This region may encompass aac or cac
  misc_feature (1756)..(1758): This region may encompass tcc or gcc
atggctgccgatggttatcttccagattggctcgaggacaacctctctgagggcattcgcgagtggtgggacttgaaacctggagccccgaaacccaaagccaaccagcaaaagcaggacgacggccggggtctggtgcttcctggctacaagtacctcggacccttcaacggactcgacaagggggagcccgtcaacgcggcggacgcagcggccctcgagcacgacaaagcctacgaccagcagctcaaagcgggtgacaatccgtacctgcggtataatcacgccgacgccgagtttcaggagcgtctgcaagaagatacgtcttttgggggcaacctcgggcgagcagtcttccaggccaagaagcgggttctcgaacctctcggtctggttgaggaaggcgctaagacggctcctggaaagaagaggccggtagagcagtcgccacaagagccagactcctccnnnggcatcggcaagacaggccagcagcccgctnnnaagagactcaattttggtcagactggcgactcagagtcagtccccgacccacaacctctcggagaacctccagcagccccctcaggtgtgggatctaatacaatggcttcaggcggtggcgctccaatggcagacaataacgaaggcgccgacggagtgggtaattcctcgggaaattggcattgcgattccacatggctgggggacagagtcatcaccaccagcacccgaacctgggccctgcccacctacaacaaccacctctacaagcaaatctccaacggcacctcgggaggaagcaccaacgacaacacctattttggctacagcaccccctgggggtattttgacttcaacagattccactgtcacttttcaccacgtgactggcaacgactcatcaacaacaattggggattccggcccaaaagactcaacttcaagctgttcaacatccaggtcaaggaagtcacgacgaacgaaggcaccaagaccatcgccaataatctcaccagcaccgtgcaggtctttacggactcggagtaccagttaccgtacgtgctaggatccgctcaccagggatgtctgcctccgttcccggcggacgtcttcatgattcctcagtacggctatttaactttaaacaatggaagccaagccgtgggacgttcctccttctactgtctggagtatttcccatcgcagatgctgagaaccggcaacaactttcagttcagctacaccttcgaggacgtgcctttccacagcagctacgcgcacagccagagcctggacaggctgatgaatcccctcatcgaccagtacctgtactacctgtccagaacgcaaacgactggaactnnngggacgcagactctgnnnttcagccaagcgggtcctagctcaatggccaaccaggctagaaattgggtgcccggaccttgctaccggcagcagcgcgtctccacgacaaccaaccagaacaacaacagcaactttgcctggacgggagctnnnaagnnnnnnctgaacggccgagactctctaatgaatccgggcgtggcaatggcttcccacaaggatgacgaggaccgcttcttcccttcgagcggggtcctgatttttggcaagcaaggagccgggaacgataatgtggattacagcnnngtgatgattacaaatgaggaagaaatcaagactaccaaccccgtggccacagaagaatatggagcagtggccaccaacnnncagnnngccaatacgcaggcgcagaccggactcgtgcacaaccagggggtgcttcccggcatggtgtggcagaatagagacgtgtacctgcagggtcccatctgggccaaaattcctcacacggacggcaactttcacccgtctcccctgatgggcggctttggactgaagcacccgcctcctcaaattctcatcaagaacacaccggttccagcggacccgccgactaccttcaaccaggccaagctgaactctttcatcacgcagtacagcaccggacaggtcagcgtggaaatcgagtgggagctgcagaaagaaaacagcaaacgctggaatccagagattcaatacacttccaactactacaaatctacaaatgtggactttgctgtcaacacggagggggtttatagcgagcctcgccccattggcacccgttacctcacccgcaacctgtaa

SEQ ID NO: 1233 - protein, 733 aa, Artificial Sequence; identical to SEQ ID NO: 432
  Description of Artificial Sequence: Synthetic polypeptide

SEQ ID NO: 1234 - DNA, 4472 bp, Artificial Sequence
  Description of Artificial Sequence: Synthetic polynucleotide
ctccatcactaggggtaaccgcgaagcgcctcccacgctgccgcgtcagcgctgacgtaaattacgtcataggggagtggtcctgtattagctgtcacgtgagtgcttttgcgacattttgcgacaccacgtggccattcatggtatatatggccgagtgagcgagcaggatctccattttgaccgcgaaatttgaacgagcagcagccatgccgggcttctacgagatcgtgcttaaggtgccgagcgacctggacgagcacctgccgggcatttctgactcgtttgtgaactgggtggcagagaaggaatgggagctgcccccggattctgacatggatcggaatctgattgagcaggcacccctgaccgtggccgagaagctacagcgcgacttcctggtccaatggcgccgcgtgagtaaggccccggaggccctcttctttgttcagttcgagaagggcgagtcctacttccacctccatattctggtagagaccacgggggtcaaatccatggtgctgggccgcttcctgagtcagattcgggacaagctggtgcagaccatctaccgcgggatcgagccgaccctgcccaactggttcgcggtgacaaagacgcgtaatggcgccggaggggggaacaaggtggtggacgagtgctacatccccaactacctgctgcccaagactcagcccgagctgcagtgggcgtggactaacatggaggagtatataagcgcgtgcttgaacctggccgagcgcaaacggctcgtggcgcagcacctgacccacgtcagccagacccaggagcagaacaaggagaatctgaacccgaattctgacgcgcctgtcatccggtcaaaaacctccgcgcgctacatggagctggtcgggtggctggtggaccggggcatcacctccgagaagcagtggatccaggaggaccaggcctcgtacatctccttcaacgccgcctccaactcgcggtctcagatcaaggccgcgctggacaatgccggcaagatcatggcgctgaccaaatccgcgcccgactacctggtaggccccgctctgcccgcggacattaaatccaaccgcatctaccgcatcctggagctgaatggctacgaccctgcctacgccggttccgtctttctcggctgggcccagaaaaagtttggcaaaaggaacaccatctggctgtttgggccggccaccacgggcaagaccaacatcgcggaagccatcgcccacgccgtgcccttctacggctgcgtcaactggaccaatgagaactttcccttcaacgattgcgtcgacaagatggtgatctggtgggaggagggcaagatgacggccaaggtcgtggagtccgccaaggccattctcggcggcagcaaggtgcgcgtggaccaaaagtgcaagtcgtccgcccagatcgatcccacccccgtgatcgtcacctccaacaccaacatgtgcgccgtgattgacgggaacagcaccaccttcgagcaccagcagccgttgcaggaccggatgttcaaatttgaacttacccgccgtctggagcacgactttggcaaggtgacaaagcaggaagtcaaagagttcttccgctgggcgcaggatcacgtgaccgaggtggcgcatgagttctacgtcagaaagggtggagctaacaaaagacccgcccccgatgacgcggatataagcgagcccaagcgggcctgcccctcagtcgcggatccatcgacgtcagacgcggaaggagctccggtggactttgccgacaggtaccaaaacaaatgttctcgtcacgcgggcatgcttcagatgctgtttccctgcaaaacatgcgagagaatgaatcagaatttcaacatttgcttcacgcacgggaccagagactgttcagaatgtttccctggcgtgtcagaatctcaaccggtcgtcagaaaaaagacgtatcggaaactctgtgcgattcatcatctgctggggcgggcacccgagattgcttgctcggcctgcgacctggtcaacgtggacctggatgactgtgtttctgagcaataaatgacttaaaccaggtatggctgccgatggttatcttccagattggctcgaggacaacctctctgagggcattcgcgagtggtgggacctgaaacctggagccccgaaacccaaagccaaccagcaaaagcaggacaacggccggggtctggtgcttcctggctacaagtacctcggacccttcaacggactcgacaagggggagcccgtcaacgcggcggacgcagcggccctcgagcacgacaaggcctacgaccagcagctccaagcgggtgacaatccgtacctgcggtataatcacgccgacgccgagtttcaggagcgtctgcaagaagatacgtcttttgggggcaacctcgggcgcgcagtcttccaggccaaaaagcgggttctcgaacctctgggcctggttgaatcgccggttaagacggctcctggaaagaagagaccggtagagccatcaccccagcgctctccagactcctctacgggcatcggcaagaaaggccagcagcccgcaaaaaagagactcaattttgggcagactggcgactcagagtcagtccccgaccctcaaccaatcggagaaccaccagcaggcccctctggtctgggatctggtacaatggctgcaggcggtggcgctccaatggcagacaataacgaaggcgccgacggagtgggtagttcctcaggaaattggcattgcgattccacatggctgggcgacagagtcatcaccaccagcacccgcacctgggccctgcccacctacaacaaccacctctacaagcaaatctccaacgggacctcgggaggaagcaccaacgacaacacctacttcggctacagcaccccctgggggtattttgacttcaacagattccactgccacttttcaccacgtgactggcagcgactcatcaacaacaactggggattccggcccaagaggctcaacttcaagctcttcaacatccaagtcaaggaggtcacgcagaatgaaggcaccaagaccatcgccaataaccttaccagcacgattcaggtctttacggactcggaataccagctcccgtacgtgctcggctcggcgcaccagggctgcctgcctccgttcccggcggacgtcttcatgattcctcagtacgggtacctgactctgaacaatggcagtcaggctgtgggccggtcgtccttctactgcctggagtactttccttctcaaatgctgagaacgggcaacaactttgaattcagctacaacttcgaggacgtgcccttccacagcagctacgcgcacagccagagcctggaccggctgatgaaccctctcatcgaccagtacttgtactacctgtcccggactcaaagcacgggcggtactgcaggaactcagcagttgctattttctcaggccgggcctaacaacatgtcggctcaggccaagaactggctacccggtccctgctaccggcagcaacgcgtctccacgacactgtcgcagaacaacaacagcaactttgcctggacgggtgccaccaagtatcatctgaatggcagagactctctggtgaatcctggcgttgccatggctacccacaaggacgacgaagagcgattttttccatccagcggagtcttaatgtttgggaaacagggagctggaaaagacaacgtggactatagcagcgtgatgctaaccagcgaggaagaaataaagaccaccaacccagtggccacagaacagtacggcgtggtggccgataacctgcaacagcaaaacgccgctcctattgtaggggccgtcaatagtcaaggagccttacctggcatggtgtggcagaaccgggacgtgtacctgcagggtcccatctgggccaagattcctcatacggacggcaactttcatccctcgccgctgatgggaggctttggactgaagcatccgcctcctcagatcctgattaaaaacacacctgttcccgcggatcctccgaccaccttcactaaggccaagctggcttctttcatcacgcagtacagtaccggccaggtcagcgtggagatcgagtgggagctgcagaaggagaacagcaaacgctggaacccagagattcagtacacttccaactactacaaatctacaaatgtggactttgctgtcaatactgagggtacttattccgagcctcgccccattggcacccgttacctcacccgtaatctgtaattacatgttaatcaataaaccggttaattcgtttcagttgaactttggtctcctgtccttcttatcttatcggttaccatagaaactggttacttattaactgcttggtgcgcttcgcgataaaagacttacgtcatcgggttacccctagtgatgga

SEQ ID NO: 1235 - DNA, 2208 bp, Artificial Sequence
  Description of Artificial Sequence: Synthetic polynucleotide
atggctgccgatggttatcttccagattggctcgaggacactctctctgaaggaataagacagtggtggaagctcaaacctggcccaccaccaccaaagcccgcagagcggcataaggacgacagcaggggtcttgtgcttcctgggtacaagtacctcggacccttcaacggactcgacaagggagagccggtcaacgaggcagacgccgcggccctcgagcacgacaaagcctacgaccggcagctcgacagcggagacaacccgtacctcaagtacaaccacgccgacgcggagtttcaggagcgccttaaagaagatacgtcttttgggggcaacctcggacgagcagtcttccaggcgaaaaagagggttcttgaacctctgggcctggttgaggaacctgttaagaaggctccgggaaaaaagaggccggtagagcactctcctgtggagccagactcctcctcgggaaccggaaaggcgggccagcagcctgcaagaaaaagattgaattttggtcagactggagacgcagactcagtacctgacccccagcctctcggacagccaccagcagccccctctggtctgggaactaataccatggctacaggcagtggcgcaccaatggcagacaataacgagggtgccgacggagtgggtaattcctcgggaaattggcattgcgattccacatggatgggcgacagagtcatcaccaccagcacccgaacctgggccctgcccacctacaacaaccacctctacaaacaaatttccagccaatcaggagcctcgaacgacaatcactactttggctacagcaccccttgggggtattttgacttcaacagattccactgccacttttcaccacgtgactggcaaagactcatcaacaacaactggggattccgacccaagagactcaacttcaagctctttaacattcaagtcaaagaggtcacgcagaatgacggtacgacgacgattgccaataaccttaccagcacggttcaggtgtttactgactcggagtaccagctcccgtacgtcctcggctcggcgcatcaaggatgcctcccgccgttcccagcagacgtcttcatggtgccacagtatggatacctcaccctgaacaacgggagtcaggcagtaggacgctcttcattttactgcctggagtactttccttctcagatgctgcgtaccggaaacaactttaccttcagctacacttttgaggacgttcctttccacagcagctacgctcacagccagagtctggaccgtctcatgaatcctctcatcgaccagtacctgtattacttgagcagaacaaacactccaagtggaaccaccacgcagtcaaggcttcagttttctcaggccggagcgagtgacattcgggaccagtctaggaactggcttcctggaccctgttaccgccagcagcgagtatcaaagacatctgcggataacaacaacagtgaatactcgtggactggagctaccaagtaccacctcaatggcagagactctctggtgaatccgggcccggctatggcaagccacaaggacgatgaagaaaagttttttcctcagagcggggttctcatctttgggaagcaaggctcagagaaaacaaatgtggacattgaaaaggtcatgattacagacgaagaggaaatcaggacaaccaatcccgtggctacggagcagtatggttctgtatctaccaacctccagagaggcaacagacaagcagctaccgcagatgtcaacacacaaggcgttcttccaggcatggtctggcaggacagagatgtgtaccttcaggggcccatctgggcaaagattccacacacggacggacattttcacccctctcccctcatgggtggattcggacttaaacaccctcctccacagattctcatcaagaacaccccggtgcctgcgaatccttcgaccaccttcagtgcggcaaagtttgcttccttcatcacacagtactccacgggacaggtcagcgtggagatcgagtgggagctgcagaaggaaaacagcaaacgctggaatcccgaaattcagtacacttccaactacaacaagtctgttaatgtggactttactgtggacactaatggcgtgtattcagagcctcgccccattggcaccagatacctgactcgtaatctgtaa

SEQ ID NO: 1236 - protein, 735 aa, Artificial Sequence
  Description of Artificial Sequence: Synthetic polypeptide
MAADGYLPDWLEDTLSEGIRQWWKLKPGPPPPKPAERHKDDSRGLVLPGYKYLGPFNGLDKGEPVNEADAAALEHDKAYDRQLDSGDNPYLKYNHADAEFQERLKEDTSFGGNLGRAVFQAKKRVLEPLGLVEEPVKKAPGKKRPVEHSPVEPDSSSGTGKAGQQPARKRLNFGQTGDADSVPDPQPLGQPPAAPSGLGTNTMATGSGAPMADNNEGADGVGNSSGNWHCDSTWMGDRVITTSTRTWALPTYNNHLYKQISSQSGASNDNHYFGYSTPWGYFDFNRFHCHFSPRDWQRLINNNWGFRPKRLNFKLFNIQVKEVTQNDGTTTIANNLTSTVQVFTDSEYQLPYVLGSAHQGCLPPFPADVFMVPQYGYLTLNNGSQAVGRSSFYCLEYFPSQMLRTGNNFTFSYTFEDVPFHSSYAHSQSLDRLMNPLIDQYLYYLSRTNTPSGTTTQSRLQFSQAGASDIRDQSRNWLPGPCYRQQRVSKTSADNNNSEYSWTGATKYHLNGRDSLVNPGPAMASHKDDEEKFFPQSGVLIFGKQGSEKTNVDIEKVMITDEEEIRTTNPVATEQYGSVSTNLQRGNRQAATADVNTQGVLPGMVWQDRDVYLQGPIWAKIPHTDGHFHPSPLMGGFGLKHPPPQILIKNTPVPANPSTTFSAAKFASFITQYSTGQVSVEIEWELQKENSKRWNPEIQYTSNYNKSVNVDFTVDTNGVYSEPRPIGTRYLTRNL

SEQ ID NO: 1237 - DNA, 8376 bp, Artificial Sequence
  Description of Artificial Sequence: Synthetic polynucleotide
aattcccatcatcaataatataccttattttggattgaagccaatatgataatgagggggtggagtttgtgacgtggcgcggggcgtgggaacggggcgggtgacgtagtagtctctagagtcctgtattagaggtcacgtgagtgttttgcgacattttgcgacaccatgtggtcacgctgggtatttaagcccgagtgagcacgcagggtctccattttgaagcgggaggtttgaacgcgcagccaccacgccggggttttacgagattgtgattaaggtccccagcgaccttgacgggcatctgcccggcatttctgacagctttgtgaactgggtggccgagaaggaatgggagttgccgccagattctgacatggatctgaatctgattgagcaggcacccctgaccgtggccgagaagctgcagcgcgactttctgacggaatggcgccgtgtgagtaaggccccggaggcccttttctttgtgcaatttgagaagggagagagctacttccacatgcacgtgctcgtggaaaccaccggggtgaaatccatggttttgggacgtttcctgagtcagattcgcgaaaaactgattcagagaatttaccgcgggatcgagccgactttgccaaactggttcgcggtcacaaagaccagaaatggcgccggaggcgggaacaaggtggtggatgagtgctacatccccaattacttgctccccaaaacccagcctgagctccagtgggcgtggactaatatggaacagtatttaagcgcctgtttgaatctcacggagcgtaaacggttggtggcgcagcatctgacgcacgtgtcgcagacgcaggagcagaacaaagagaatcagaatcccaattctgatgcgccggtgatcagatcaaaaacttcagccaggtacatggagctggtcgggtggctcgtggacaaggggattacctcggagaagcagtggatccaggaggaccaggcctcatacatctccttcaatgcggcctccaactcgcggtcccaaatcaaggctgccttggacaatgcgggaaagattatgagcctgactaaaaccgcccccgactacctggtgggccagcagcccgtggaggacatttccagcaatcggatttataaaattttggaactaaacgggtacgatccccaatatgcggcttccgtctttctgggatgggccacgaaaaagttcggcaagaggaacaccatctggctgtttgggcctgcaactaccgggaagaccaacatcgcggaggccatagcccacactgtgcccttctacgggtgcgtaaactggaccaatgagaactttcccttcaacgactgtgtcgacaagatggtgatctggtgggaggaggggaagatgaccgccaaggtcgtggagtcggccaaagccattctcggaggaagcaaggtgcgcgtggaccagaaatgcaagtcctcggcccagatagacccgactcccgtgatcgtcacctccaacaccaacatgtgcgccgtgattgacgggaactcaacgaccttcgaacaccagcagccgttgcaagaccggatgttcaaatttgaactcacccgccgtctggatcatgactttgggaaggtcaccaagcaggaagtcaaagactttttccggtgggcaaaggatcacgtggttgaggtggagcatgaattctacgtcaaaaagggtggagccaagaaaagacccgcccccagtgacgcagatataagtgagcccaaacgggtgcgcgagtcagttgcgcagccatcgacgtcagacgcggaagcttcgatcaactacgcagacaggtaccaaaacaaatgttctcgtcacgtgggcatgaatctgatgctgtttccctgcagacaatgcgagagaatgaatcagaattcaaatatctgcttcactcacggacagaaagactgtttagagtgctttcccgtgtcagaatctcaacccgtttctgtcgtcaaaaaggcgtatcagaaactgtgctacattcatcatatcatgggaaaggtgccagacgcttgcactgcctgcgatctggtcaatgtggatttggatgactgcatctttgaacaataaatgatttaaatcaggtatggctgccgatggttatcttccagattggctcgaggacactctctctgaaggaataagacagtggtggaagctcaaacctggcccaccaccaccaaagcccgcagagcggcataaggacgacagcaggggtcttgtgcttcctgggtacaagtacctcggacccttcaacggactcgacaagggagagccggtcaacgaggcagacgccgcggccctcgagcacgacaaagcctacgaccggcagctcgacagcggagacaacccgtacctcaagtacaaccacgccgacgcggagtttcaggagcgccttaaagaagatacgtcttttgggggcaacctcggacgagcagtcttccaggcgaaaaagagggttcttgaacctctgggcctggttgaggaacctgttaagacggctccgggaaaaaagaggccggtagagcactctcctgtggagccagactcctcctcgggaaccggaaaggcgggccagcagcctgcaagaaaaagattgaattttggtcagactggagacgcagactcagtacctgacccccagcctctcggacagccaccagcagccccctctggtctgggaactaatacgatggctacaggcagtggcgcaccaatggcagacaataacgagggcgccgacggagtgggtaattcctcgggaaattggcattgcgattccacatggatgggcgacagagtcatcaccaccagcacccgaacctgggccctgcccacctacaacaaccacctctacaaacaaatttccagccaatcaggagcctcgaacgacaatcactactttggctacagcaccccttgggggtattttgacttcaacagattccactgccacttttcaccacgtgactggcaaagactcatcaacaacaactggggattccgacccaagagactcaacttcaagctctttaacattcaagtcaaagaggtcacgcagaatgacggtacgacgacgattgccaataaccttaccagcacggttcaggtgtttactgactcggagtaccagctcccgtacgtcctcggctcggcgcatcaaggatgcctcccgccgttcccagcagacgtcttcatggtgccacagtatggatacctcaccctgaacaacgggagtcaggcagtaggacgctcttcattttactgcctggagtactttccttctcagatgctgcgtaccggaaacaactttaccttcagctacacttttgaggacgttcctttccacagcagctacgctcacagccagagtctggaccgtctcatgaatcctctcatcgaccagtacctgtattacttgagcagaacaaacactccaagtggaaccaccacgcagtcaaggcttcagttttctcaggccggagcgagtgacattcgggaccagtctaggaactggcttcctggaccctgttaccgccagcagcgagtatcaaagacatctgcggataacaacaacagtgaatactcgtggactggagctaccaagtaccacctcaatggcagagactctctggtgaatccgggcccggccatggcaagccacaaggacgatgaagaaaagttttttcctcagagcggggttctcatctttgggaagcaaggctcagagaaaacaaatgtggacattgaaaaggtcatgattacagacgaagaggaaatcaggacaaccaatcccgtggctacggagcagtatggttctgtatctaccaacctccagagaggcaacagacaagcagctaccgcagatgtcaacacacaaggcgttcttccaggcatggtctggcaggacagagatgtgtaccttcaggggcccatctgggcaaagattccacacacggacggacattttcacccctctcccctcatgggtggattcggacttaaacaccctcctccacagattctcatcaagaacaccccggtacctgcgaatccttcgaccaccttcagtgcggcaaagtttgcttccttcatcacacagtactccacgggacaggtcagcgtggagatcgagtgggagctgcagaaggaaaacagcaaacgctggaatcccgaaattcagtacacttccaactacaacaagtctgttaatgtggactttactgtggacactaatggcgtgtattcagagcctcgccccattggcaccagatacctgactcgtaatctgtaattgcttgttaatcaataaaccgtttaattcgtttcagttgaactttggtctctgcgtatttctttcttatctagtttccatgctctagagtcctgtattagaggtcacgtgagtgttttgcgacattttgcgacaccatgtggtcacgctgggtatttaagcccgagtgagcacgcagggtctccattttgaagcgggaggtttgaacgcgcagccaccacggcggggttttacgagattgtgattaaggtccccagcgaccttgacgggcatctgcccggcatttctgacagctttgtgaactgggtggccgagaaggaatgggagttgccgccagattctgacatggatctgaatctgattgagcaggcacccctgaccgtggccgagaagctgcatcgctggcgtaatagcgaagaggcccgcaccgatcgcccttcccaacagttgcgcagcctgaatggcgaatggaattccagacgattgagcgtcaaaatgtaggtatttccatgagcgtttttcctgttgcaatggctggcggtaatattgttctggatattaccagcaaggccgatagtttgagttcttctactcaggcaagtgatgttattactaatcaaagaagtattgcgacaacggttaatttgcgtgatggacagactcttttactcggtggcctcactgattataaaaacacttctcaggattctggcgtaccgttcctgtctaaaatccctttaatcggcctcctgtttagctcccgctctgattctaacgaggaaagcacgttatacgtgctcgtcaaagcaaccatagtacgcgccctgtagcggcgcattaagcgcggcgggtgtggtggttacgcgcagcgtgaccgctacacttgccagcgccctagcgcccgctcctttcgctttcttcccttcctttctcgccacgttcgccggctttccccgtcaagctctaaatcgggggctccctttagggttccgatttagtgctttacggcacctcgaccccaaaaaacttgattagggtgatggttcacgtagtgggccatcgccctgatagacggtttttcgccctttgacgttggagtccacgttctttaatagtggactcttgttccaaactggaacaacactcaaccctatctcggtctattcttttgatttataagggattttgccgatttcggcctattggttaaaaaatgagctgatttaacaaaaatttaacgcgaattttaacaaaatattaacgtttacaatttaaatatttgcttatacaatcttcctgtttttggggcttttctgattatcaaccggggtacatatgattgacatgctagttttacgattaccgttcatcgattctcttgtttgctccagactctcaggcaatgacctgatagcctttgtagagacctctcaaaaatagctaccctctccggcatgaatttatcagctagaacggttgaatatcatattgatggtgatttgactgtctccggcctttctcacccgtttgaatctttacctacacattactcaggcattgcatttaaaatatatgagggttctaaaaatttttatccttgcgttgaaataaaggcttctcccgcaaaagtattacagggtcataatgtttttggtacaaccgatttagctttatgctctgaggctttattgcttaattttgctaattctttgccttgcctgtatgatttattggatgttggaattcctgatgcggtattttctccttacgcatctgtgcggtatttcacaccgcatatggtgcactctcagtacaatctgctctgatgccgcatagttaagccagccccgacacccgccaacacccgctgacgcgccctgacgggcttgtctgctcccggcatccgcttacagacaagctgtgaccgtctccgggagctgcatgtgtcagaggttttcaccgtcatcaccgaaacgcgcgagacgaaagggcctcgtgatacgcctatttttataggttaatgtcatgataataatggtttcttagacgtcaggtggcacttttcggggaaatgtgcgcggaacccctatttgtttatttttctaaatacattcaaatatgtatccgctcatgagacaataaccctgataaatgcttcaataatattgaaaaaggaagagtatgagtattcaacatttccgtgtcgcccttattcccttttttgcggcattttgccttcctgtttttgctcacccagaaacgctggtgaaagtaaaagatgctgaagatcagttgggtgcacgagtgggttacatcgaactggatctcaacagcggtaagatccttgagagttttcgccccgaagaacgttttccaatgatgagcacttttaaagttctgctatgtggcgcggtattatcccgtattgacgccgggcaagagcaactcggtcgccgcatacactattctcagaatgacttggttgagtactcaccagtcacagaaaagcatcttacggatggcatgacagtaagagaattatgcagtgctgccataaccatgagtgataacactgcggccaacttacttctgacaacgatcggaggaccgaaggagctaaccgcttttttgcacaacatgggggatcatgtaactcgccttgatcgttgggaaccggagctgaatgaagccataccaaacgacgagcgtgacaccacgatgcctgtagcaatggcaacaacgttgcgcaaactattaactggcgaactacttactctagcttcccggcaacaattaatagactggatggaggcggataaagttgcaggaccacttctgcgctcggcccttccggctggctggtttattgctgataaatctggagccggtgagcgtgggtctcgcggtatcattgcagcactggggccagatggtaagccctcccgtatcgtagttatctacacgacggggagtcaggcaactatggatgaacgaaatagacagatcgctgagataggtgcctcactgattaagcattggtaactgtcagaccaagtttactcatatatactttagattgatttaaaacttcatttttaatttaaaaggatctaggtgaagatcctttttgataatctcatgaccaaaatcccttaacgtgagttttcgttccactgagcgtcagaccccgtagaaaagatcaaaggatcttcttgagatcctttttttctgcgcgtaatctgctgcttgcaaacaaaaaaaccaccgctaccagcggtggtttgtttgccggatcaagagctaccaactctttttccgaaggtaactggcttcagcagagcgcagataccaaatactgtccttctagtgtagccgtagttaggccaccacttcaagaactctgtagcaccgcctacatacctcgctctgctaatcctgttaccagtggctgctgccagtggcgataagtcgtgtcttaccgggttggactcaagacgatagttaccggataaggcgcagcggtcgggctgaacggggggttcgtgcacacagcccagcttggagcgaacgacctacaccgaactgagatacctacagcgtgagctatgagaaagcgccacgcttcccgaagggagaaaggcggacaggtatccggtaagcggcagggtcggaacaggagagcgcacgagggagcttccagggggaaacgcctggtatctttatagtcctgtcgggtttcgccacctctgacttgagcgtcgatttttgtgatgctcgtcaggggggcggagcctatggaaaaacgccagcaacgcggcctttttacggttcctggccttttgctggccttttgctcacatgttctttcctgcgttatcccctgattctgtggataaccgtattaccgcctttgagtgagctgataccgctcgccgcagccgaacgaccgagcgcagcgagtcagtgagcgaggaagcggaagagcgcccaatacgcaaaccgcctctccccgcgcgttggccgattcattaatgca

SEQ ID NO: 1238 - DNA, 1085 bp, Artificial Sequence
  Description of Artificial Sequence: Synthetic polynucleotide
  modified_base (611)..(611): a, c, g, or t
  modified_base (640)..(640): a, c, g, or t
  modified_base (1039)..(1039): a, c, g, or t
tgcccacttacaacaaccatctctacaagcaaatctccagcvvmdcaggagctascaacgacaaccactactttggctacagcaccccttgggggtattttgactttaacagattccactgccacttctcaccacgtgactggcagcgactcattaacaacaactggggattccggcccaagaaactcagcttcaagctcttcaacatccaagttagaggggtcacgcagaacgatggcacgacgactattgccaataaccttaccagcacggttcaagtgtttacggactcggagtatcagctcccgtacgtgctcgggtcggcgcaccaaggctgtctcccgccgtttccagcggacgtcttcatggtccctcagtatggatacctcaccctgaacaacggaagtcaagcggtgggacgctcatccttttactgcctggagtacttcccttcgcagatgctaaggactggaaataacttccaattcagctataccttcgaggatgtaccttttcacagcagctacgctcacagccagagtttggatcgcttgatgaatcctcttattgatcagtatctgtactacctgaacagaacgcaargcamcvcnrgcggaacarccrvcmhsmrsvvsctgvngtttagccaggctgggcctcagtctatgtctttgcaggccagaaattggctacctgggccctgctaccggcaacagagactttcaamarycbmcrvcsrsaacaacaacagtrastttccttggmcagcggccagcamatatcatctcaatggccgcgactcgctggtgaatccaggaccagctatggccagtcacrrggacgatrmsgrsaratttttccctatgcacggcaatctaatatttggcaaasaarrcrscrvsrvarvcratrycgmsdwcgrsvrsgtaatgattacggatgaagaagagattcgtaccaccaatcctgtggcaacagagcagtatggaactgtggcaaataacttgcagrvsvvsmrsrvcvvscccacgdhtvvsrnsgtcvmscatcagggggccttacctggcatggtgtggcaagatcgt

SEQ ID NO: 1239 - protein, 620 aa, Artificial Sequence
  Description of Artificial Sequence: Synthetic polypeptide
  MOD_RES (263)..(264): Any naturally occurring amino acid
  MOD_RES (267)..(267): Any naturally occurring amino acid
  MOD_RES (450)..(453): Any naturally occurring amino acid
  MOD_RES (456)..(460): Any naturally occurring amino acid
  MOD_RES (462)..(462): Any naturally occurring amino acid
  MOD_RES (491)..(495): Any naturally occurring amino acid
  MOD_RES (500)..(500): Any naturally occurring amino acid
  MOD_RES (504)..(504): Any naturally occurring amino acid
  MOD_RES (508)..(508): Any naturally occurring amino acid
  MOD_RES (528)..(528): Any naturally occurring amino acid
  MOD_RES (531)..(533): Any naturally occurring amino acid
  MOD_RES (546)..(557): Any naturally occurring amino acid
  MOD_RES (586)..(590): Any naturally occurring amino acid
  MOD_RES (593)..(595): Any naturally occurring amino acid
  MOD_RES (597)..(597): Any naturally occurring amino acid
MAADGYLPDWLEDNLSEGIREWWALKPGVPQPKANQQHQDNRRGLVLPGYKYLGPGNGLDKGEPVNEADAAALEHDKAYDQQLKAGDNPYLKYNHADAEFQERLQEDTSFGGNLGRAVFQAKKRILEPLGLVEEAAKTAPGKKGAVDQSPQEPDSSSGVGKSGKQPARKRLNFGQTGDSESVPDPQPLGEPPAAPTSLGSNTMASGGGAPMADNNEGADGVGNSSGNWHCDSQWLGDRVITTSTRTWALPTYNNHLYKQISSXXGAXNDNHYFGYSTPWGYFDFNRFHCHFSPRDWQRLINNNWGFRPKKLSFKLFNIQVRGVTQNDGTTTIANNLTSTVQVFTDSEYQLPYVLGSAHQGCLPPFPADVFMVPQYGYLTLNNGSQAVGRSSFYCLEYFPSQMLRTGNNFQFSYTFEDVPFHSSYAHSQSLDRLMNPLIDQYLYYLNRTQXXXXGTXXXXXLXFSQAGPQSMSLQARNWLPGPCYRQQRLSXXXXXNNNSXFPWXAASXYHLNGRDSLVNPGPAMASHXDDXXXFFPMHGNLIFGKXXXXXXXXXXXXVMITDEEEIRTTNPVATEQYGTVANNLQXXXXXPTXXXVXHQGALPGMVWQDRDVYLQGPIWA

SEQ ID NO: 1240 - DNA, 1491 bp, Artificial Sequence
  Description of Artificial Sequence: Synthetic polynucleotide
accaccagcaccagaacctgggccctgcccacttacaacaaccatctctacaagcaaatctccagccaatcaggagcttcaaacgacaaccactactttggctacagcaccccttgggggtattttgactttaacagattccactgccacttctcaccacgtgactggcagcgactcattaacaacaactggggattccggcccaagaaactcagcttcaagctcttcaacatccaagttagaggggtcacgcagaacgatggcacgacgactattgccaataaccttaccagcacggttcaagtgtttacggactcggagtatcagctcccgtacgtgctcgggtcggcgcaccaaggctgtctcccgccgtttccagcggacgtcttcatggtccctcagtatggatacctcaccctgaacaacggaagtcaagcggtgggacgctcatccttttactgcctggagtacttcccttcgcagatgctaaggactggaaataacttccaattcagctataccttcgaggatgtaccttttcacagcagctacgctcacagccagagtttggatcgcttgatgaatcctcttattgatcagtatctgtactacctgaacagaacgcaaggaacaacctctggaacaaccaaccaatcacggctgctttttagccaggctgggcctcagtctatgtctttgcaggccagaaattggctacctgggccctgctaccggcaacagagactttcaaagactgctaacgacaacaacaacagtaactttccttggacagcggccagcaaatatcatctcaatggccgcgactcgctggtgaatccaggaccagctatggccagtcacaaggacgatgaagaaaaatttttccctatgcacggcaatctaatatttggcaaagaagggacaacggcaagtaacgcagaattagataatgtaatgattacggatgaagaagagattcgtaccaccaatcctgtggcaacagagcagtatggaactgtggcaaataacttgcagagctcaaatacagctcccacgactggaactgtcaatcatcagggggccttacctggcatggtgtggcaagatcgtgacgtctaccttcaaggacctatctgggcaaagattcctcacacggatggacactttcatccttctcctctgatgggaggctttggactgaaacatccgcctcctcaaatcatgatcaaaaatactccggtaccggcaaatcctccgacgactttcagcccggccaagtttgcttcatttatcactcagtactccactggacaggtcagcgtggaaattgagtgggagctacagaaagaaaacagcaaacgttggaatccagagattcagtacacttccaactacaacaagtctgttaatgtggactttactgtagacactaatggtgtttatagtgaacctcgccctattggaacccggtatctcacacgaaacttgtga

SEQ ID NO: 1241 - protein, 482 aa, Artificial Sequence
  Description of Artificial Sequence: Synthetic polypeptide
TTSTRTWALPTYNNHLYKQISSQSGASNDNHYFGYSTPWYFDFNRFHCHFSPRDWQRLNNNWGFRPKKLSFKLFNIQRGVTQNDGTTTIANNLTSTQVFTDSEYQLPYVLGSAHQCLPPFPADVFMVPQYGYLTNNGSQAVGRSSFYCLEYFPQMLRTGNNFQFSYTFEDVPHSSYAHSQSLDRLMNPLIDYLYYLNRTQGTTSGTTNQSLLFSQAGPQSMSLQARNWLGPCYRQQRLSKTANDNNNSFPWTAASKYHLNGRDSLVNGPAMASHKDDEEKFFPMHGLIFGKEGTTASNAELDNVMITDEEEIRTTNPVATEQYGTVANNLQSSNTAPTTGTVNHQGALPGMVWQDRDVYLQGPIWAKIPHTDGHFHPSPLMGGFGLKHPPPQIMIKNTPVPANPPTTFSPAKFASFITQYSTGQVSVEIEWELQKENSKRWNPEIQYTSNYNKSVNVDFTVDTNGVYSEPRPIGTRYLTRNL

SEQ ID NO: 1242 - DNA, 1140 bp, Artificial Sequence
  Description of Artificial Sequence: Synthetic polynucleotide
  modified_base (636)..(636): a, c, g, or t
  modified_base (665)..(665): a, c, g, or t
  modified_base (1064)..(1064): a, c, g, or t
accaccagcaccagaacctgggccctgcccacttacaacaaccatctctacaagcaaatctccagcvvmdcaggagctascaacgacaaccactactttggctacagcaccccttgggggtattttgactttaacagattccactgccacttctcaccacgtgactggcagcgactcattaacaacaactggggattccggcccaagaaactcagcttcaagctcttcaacatccaagttagaggggtcacgcagaacgatggcacgacgactattgccaataaccttaccagcacggttcaagtgtttacggactcggagtatcagctcccgtacgtgctcgggtcggcgcaccaaggctgtctcccgccgtttccagcggacgtcttcatggtccctcagtatggatacctcaccctgaacaacggaagtcaagcggtgggacgctcatccttttactgcctggagtacttcccttcgcagatgctaaggactggaaataacttccaattcagctataccttcgaggatgtaccttttcacagcagctacgctcacagccagagtttggatcgcttgatgaatcctcttattgatcagtatctgtactacctgaacagaacgcaargcamcvcnrgcggaacarccrvcmhsmrsvvsctgvngtttagccaggctgggcctcagtctatgtctttgcaggccagaaattggctacctgggccctgctaccggcaacagagactttcaamarycbmcrvcsrsaacaacaacagtrastttccttggmcagcggccagcamatatcatctcaatggccgcgactcgctggtgaatccaggaccagctatggccagtcacrrggacgatrmsgrsaratttttccctatgcacggcaatctaatatttggcaaasaarrcrscrvsrvarvcratrycgmsdwcgrsvrsgtaatgattacggatgaagaagagattcgtaccaccaatcctgtggcaacagagcagtatggaactgtggcaaataacttgcagrvsvvsmrsrvcvvscccacgdhtvvsrnsgtcvmscatcagggggccttacctggcatggtgtggcaagatcgtgacgtctaccttcaaggacctatctgggca

SEQ ID NO: 1243 - protein, 620 aa, Artificial Sequence; identical to SEQ ID NO: 1239
  Description of Artificial Sequence: Synthetic polypeptide
  MOD_RES (263)..(264): Any naturally occurring amino acid
  MOD_RES (267)..(267): Any naturally occurring amino acid
  MOD_RES (450)..(453): Any naturally occurring amino acid
  MOD_RES (456)..(460): Any naturally occurring amino acid
  MOD_RES (462)..(462): Any naturally occurring amino acid
  MOD_RES (491)..(495): Any naturally occurring amino acid
  MOD_RES (500)..(500): Any naturally occurring amino acid
  MOD_RES (504)..(504): Any naturally occurring amino acid
  MOD_RES (508)..(508): Any naturally occurring amino acid
  MOD_RES (528)..(528): Any naturally occurring amino acid
  MOD_RES (531)..(533): Any naturally occurring amino acid
  MOD_RES (546)..(557): Any naturally occurring amino acid
  MOD_RES (586)..(590): Any naturally occurring amino acid
  MOD_RES (593)..(595): Any naturally occurring amino acid
  MOD_RES (597)..(597): Any naturally occurring amino acid

SEQ ID NO: 1244 - protein, 738 aa, Artificial Sequence; identical to SEQ ID NO: 16
  Description of Artificial Sequence: Synthetic polypeptide

SEQ ID NO: 1245 - DNA, 2258 bp, Artificial Sequence
  Description of Artificial Sequence: Synthetic polynucleotide
tcgaggacaacctctctgagggcattcgcgagtggtgggacttgaaacctggagccccgaaacccaaagccaaccagcaaaagcaggacgacggccggggtctggtgcttcctggctacaagtacctcggacccttcaacggactcgacaagggggagcccgtcaacgcggcggacgcagcggccctcgagcacgacaaggcctacgaccagcagctcaaagcgggtgacaatccgtacctgcggtataaccacgccgacgccgagtttcaggagcgtctgcaagaagatacgtcttttgggggcaacctcgggcgagcagtcttccaggccaagaagcgggttctcgaacctctcggtctggttgaggaaggcgctaagacggctcctggaaagaagagaccggtagagccatcaccccagcgttctccagactcctctacgggcatcggcaagaaaggccagcagcccgcgaaaaagagactcaactttgggcagactggcgactcagagtcagtgcccgaccctcaaccaatcggagaaccccccgcaggcccctctggtctgggatctggtacaatggctgcaggcggtggcgctccaatggcagacaataacgaaggcgccgacggagtgggtagttcctcaggaaattggcattgcgattccacatggctgggcgacagagtcatcaccaccagcacccgaacctgggccctccccacctacaacaaccacctctacaagcaaatctccaacgggacttcgggaggaagcaccaacgacaacacctacttcggctacagcaccccctgggggtattttgactttaacagattccactgccacttctcaccacgtgactggcagcgactcatcaacaacaactggggattccggcccaagagactcaacttcaagctcttcaacatccaggtcaaggaggtcacgcagaatgaaggcaccaagaccatcgccaataaccttaccagcacgattcaggtctttacggactcggaataccagctcccgtacgtcctcggctctgcgcaccagggctgcctgcctccgttcccggcggacgtcttcatgattcctcagtacgggtacctgactctgaacaatggcagtcaggccgtgggccgttcctccttctactgcctggagtactttccttctcaaatgctgagaacgggcaacaactttgagttcagctaccagtttgaggacgtgccttttcacagcagctacgcgcacagccaaagcctggaccggctgatgaaccccctcatcgaccagtacctgtactacctgtctcggactcagtccacgggaggtaccgcaggaactcagcagttgctattttctcaggccgggcctaataacatgtcggctcaggccaaaaactggctacccgggccctgctaccggcagcaacgcgtctccacgacactgtcgcaaaataacaacagcaactttgcctggaccggtgccaccaagtatcatctgaatggcagagactctctggtaaatcccggtgtcgctatggcaacccacaaggacgacgaagagcgattttttccgtccagcggagtcttaatgtttgggaaacagggagctggaaaagacaacgtggactatagcagcgttatgctaaccagtgaggaagaaattaaaaccaccaacccagtggccacagaacagtacggcgtggtggccgataacctgcaacagcaaaacgccgctcctattgtaggggccgtcaacagtcaaggagccttacctggcatggtctggcagaaccgggacgtgtacctgcagggtcctatctgggccaagattcctcacacggacggaaactttcatccctcgccgctgatgggaggctttggactgaaacacccgcctcctcagatcctgattaagaatacacctgttcccgcggatcctccaactaccttcagtcaagctaagctggcgtcgttcatcacgcagtacagcaccggacaggtcagcgtggaaattgaatgggagctgcagaaagaaaacagcaaacgctggaacccagagattcaatacacttccaactactacaaatctacaaatgtggactttgctgttaacacagatggcacttattctgagcctcgccccatcggcacccgttacctcacccgtaatctgtaattgcttgttaatcaataaaccggttgattcgtttcagttgaactttggtctctgcgaagggcgaattcgttt

SEQ ID NO: 1246 - DNA, 2208 bp, Artificial Sequence
  Description of Artificial Sequence: Synthetic polynucleotide
atggctgccgatggttatcttccagattggctcgaggacactctctctgaaggaataagacagtggtggaagctcaaacctggcccaccaccaccaaagcccgcagagcggcataaggacgacagcaggggtcttgtgcttcctgggtacaagtacctcggacccttcaacggactcgacaagggagagccggtcaacgaggcagacgccgcggccctcgagcacgacaaagcctacgaccggcagctcgacagcggagacaacccgtacctcaagtacaaccacgccgacgcggagtttcaggagcgccttaaagaagatacgtcttttgggggcaacctcggacgagcagtcttccaggcgaaaaagagggttcttgaacctctgggcctggttgaggaacctgttaagacggctccgggaaaaaagaggccggtagagcactctcctgtggagccagactcctcctcgggaaccggaaaggcgggccagcagcctgcaagaaaaagattgaattttggtcagactggagacgcagactcagtacctgacccccagcctctcggacagccaccagcagccccctctggtctgggaactaatacgatggctacaggcagtggcgcaccaatggcagacaataacgagggcgccgacggagtgggtaattcctcgggaaattggcattgcgattccacatggatgggcgacagagtcatcaccaccagcacccgaacctgggccctgcccacctacaacaaccacctctacaaacaaatttccagccaatcaggagcctcgaacgacaatcactactttggctacagcaccccttgggggtattttgacttcaacagattccactgccacttttcaccacgtgactggcaaagactcatcaacaacaactggggattccgacccaagagactcaacttcaagctctttaacattcaagtcaaagaggtcacgcagaatgacggtacgacgacgattgccaataaccttaccagcacggttcaggtgtttactgactcggagtaccagctcccgtacgtcctcggctcggcgcatcaaggatgcctcccgccgttcccagcagacgtcttcatggtgccacagtatggatacctcaccctgaacaacgggagtcaggcagtaggacgctcttcattttactgcctggagtactttccttctcagatgctgcgtaccggaaacaactttaccttcagctacacttttgaggacgttcctttccacagcagctacgctcacagccagagtctggaccgtctcatgaatcctctcatcgaccagtacctgtatttcttaagcagaacaaacactccaagtggaaccaccacgcagtcaaggcttcagttttctcaggccggagcgagtgacattcgggaccagtctaggaactggcttcctggaccctgttaccgccagcagcgagtatcaaagacatctgcggataacaacaacagtgaattctcgtggaccggtgctaccaagtaccacctcaatggcagagactctctggtgaatccgggcccggccatggcaagccacaaggacgatgaagaaaagttttttcctcagagcggggttctcatctttgggaagcaaggctcagagaaaacaaatgtggacattgaaaaggtcatgattacagacgaagaggaaatcaggacaaccaatcccgtggctacggagcagtatggttctgtatctaccaacctccagagaggcaacagacaagcagctaccgcagatgtcaacacacaaggcgttcttccaggcatggtctggcaggacagagatgtgtaccttcaggggcccatctgggcaaagattccacacacggacggacattttcacccctctcccctcatgggtggattcggacttaaacaccctcctccacagattctcatcaagaacaccccggtacctgcgaatccttcgaccaccttcagtgcggcaaagtttgcttccttcatcacacagtactccacgggacaggtcagcgtggagatcgagtgggagctgcagaaggaaaacagcaaacgctggaatcccgaaattcagtacacttccaactacaacaagtctgttaatgtggactttactgtggacactaatggcgtgtattcagagcctcgccccattggtaccagattcctgactcgtaatctgtaa

SEQ ID NO: 1247 - protein, 737 aa, Artificial Sequence
  Description of Artificial Sequence: Synthetic polypeptide
MAADGYLPDWLEDNLSEGIREWWDLKPGAPKPKANQQKQDNGRGLVLPGYKYLGPFNGLDKGEPVNAADAAALEHDKAYDQQLQAGDNPYLRYNHADAEFQERLQEDTSFGGNLGRAVFQAKKRVLEPLGLVESPVKTAPGKKRPVEPSPQRSPDSSTGIGKKGQQPAKKRLNFGQTGDSESVPDPQPIGEPPAAPSGVGPNTMAAGGGAPMADNNEGADGVGSSSGNWHCDSTWLGDRVITTSTRTWALPTYNNHLYKQISNGTSGGSTNDNTYFGYSTPWGYFDFNRFHCHFSPRDWQRLINNNWGFRPKRLNFKLFNIQVKEVTQNEGTKTIANNLTSTIQVFTDSEYQLPYVLGSAHQGCLPPFPADVFMIPQYGYLTLNNGSQAVGRSSFYCLEYFPSQMLRTGNNFEFSYNFEDVPFHSSYAHSQSLDRLMNPLIDQYLYYLSRTQSTGGTAGTQQLLFSQAGPNNMSAQAKNWLPGPCYRQQRVSTTLSQNNNSNFAWTGATKYHLNGRDSLVNPGVAMATHKDDEERFFPSSGVLMFGKQGAGKDNVDYSSVMLTSEEEIKTTNPVATEQYGWADNLQQQNAAPIVGAVNSQGALPGMVWQNRDVYLQGPIWAKIPHTDGNFHPSPLMGGFGLKHPPPQILIKNTPVPADPPTTFNQAKLASFITQYSTGQVSVEIEWELQKENSKRWNPEIQYTSNYYKSTNVDFAVNTEGTYSEPRPIGTRYLTRNL

SEQ ID NO: 1248 - DNA, 2211 bp, Artificial Sequence
  Description of Artificial Sequence: Synthetic polynucleotide
atggctgccgatggttatcttccagattggctcgaggacactctctctgaaggaataagacagtggtggaagctcaaacctggcccaccaccaccaaagcccgcagagcggcataaggacgacagcaggggtcttgtgcttcctgggtacaagtacctcggacccttcaacggactcgacaagggagagccggtcaacgaggcagacgccgcggccctcgagcacgacaaagcctacgaccggcagctcgacagcggagacaacccgtacctcaagtacaaccacgccgacgcggagtttcaggagcgccttaaagaagatacgtcttttgggggcaacctcggacgagcagtcttccaggcgaaaaagagggttcttgaacctctgggcctggttgaggaacctgttaagacggctccgggaaaaaagaggccggtagagcactctcctgtggagccagactcctcctcgggaaccggaaaggcgggccagcagcctgcaagaaaaagattgaattttggtcagactggagacgcagactcagtacctgacccccagcctctcggacagccaccagcagccccctctggtctgggaactaatacgatggctacaggcagtggcgcaccaatggcagacaataacgagggcgccgacggagtgggtaattcctcgggaaattggcattgcgattccacatggatgggcgacagagtcatcaccaccagcacccgaacctgggccctgcccacctacaacaaccacctctacaaacaaatttccagcgcttcaacgggagcctcgaacgacaatcactactttggctacagcaccccttgggggtattttgacttcaacagattccactgccacttttcaccacgtgactggcaaagactcatcaacaacaactggggattccgacccaagagactcaacttcaagctctttaacattcaagtcaaagaggtcacgcagaatgacggtacgacgacgattgccaataaccttaccagcacggttcaggtgtttactgactcggagtaccagctcccgtacgtcctcggctcggcgcatcaaggatgcctcccgccgttcccagcagacgtcttcatggtgccacagtatggatacctcaccctgaacaacgggagtcaggcagtaggacgctcttcattttactgcctggagtactttccttctcagatgctgcgtaccggaaacaactttaccttcagctacacttttgaggacgttcctttccacagcagctacgctcacagccagagtctggaccgtctcatgaatcctctcatcgaccagtacctgtattacttgagcagaacaaacactccaagtggaaccaccacgcagtcaaggcttcagttttctcaggccggagcgagtgacattcgggaccagtctaggaactggcttcctggaccctgttaccgccagcagcgagtatcaaagacatctgcggataacaacaacagtgaatactcgtggactggagctaccaagtaccacctcaatggcagagactctctggtgaatccgggcccggccatggcaagccacaaggacgatgaagaaaagttttttcctcagagcggggttctcatctttgggaagcaaggctcagagaaaacaaatgtggacattgaaaaggtcatgattacagacgaagaggaaatcaggacaaccaatcccgtggctacggagcagtatggttctgtatctaccaacctccagagaggcaacagacaagcagctaccgcagatgtcaacacacaaggcgttcttccaggcatggtctggcaggacagagatgtgtaccttcaggggcccatctgggcaaagattccacacacggacggacattttcacccctctcccctcatgggtggattcggacttaaacaccctcctccacagattctcatcaagaacaccccggtacctgcgaatccttcgaccaccttcagtgcggcaaagtttgcttccttcatcacacagtactccacgggacaggtcagcgtggagatcgagtgggagctgcagaaggaaaacagcaaacgctggaatcccgaaattcagtacacttccaactacgccaagtctgtcaatgtggactttactgtggacaataatggcgtgtattcagagcctcgccccattggcaccagatacctgactcgtaatctgtaa

SEQ ID NO: 1249 - DNA, 2208 bp, Artificial Sequence
  Description of Artificial Sequence: Synthetic polynucleotide
atggctgccgatggttatcttccagattggctcgaggacaacctctctgagggcattcgcgagtggtgggacttgaaacctggagccccgaagcccaaagccaaccagcaaaagcaggacgacggccggggtctggtgcttcctggctacaagtacctcggacccttcaacggactcgacaagggggagcccgtcaacgcggcggacgcagcggccctcgagcacgacaaggcctacgaccagcagctcaaagcgggtgacaatccgtacctgcggtataaccacgccgacgccgagtttcaggagcgtctgcaagaagatacgtcttttgggggcaacctcgggcgagcagtcttccaggccaagaagcgggttctcgaacctctcggtctggttgaggaaggcgctaagacggctcctggaaagaaacgtccggtagagcagtcgccacaagagccagactcctcctcgggcatcggcaagacaggccagcagcccgctaaaaagagactcaattttggtcagactggcgactcagagtcagtccccgatccacaacctctcggagaacctccagcaacccccgctgctgtgggacctactacaatggcttcaggcggtggcgcaccaatggcagacaataacgaaggcgccgacggagtgggtaatgcctcaggaaattggcattgcgattccacatggctgggcgacagagtcatcaccaccagcacccgcacctgggccttgcccacctacaataaccacctctacaagcaaatctccagtgcttcaggggccagcaacgacaaccactacttcggctacagcaccccctgggggtattttgatttcaacagattccactgccacttttcaccacgtgactggcagcgactcatcaacaacaattggggattccggcccaagagactcaacttcaaactcttcaacatccaagtcaaggaggtcacgacgaatgatggcgtcacaaccatcgctaataaccttaccagcacggttcaagtcttctcggactcggagtaccagcttccgtacgtcctcggctctgcgcaccagggctgcctccctccgttcccggcggacgtgttcatgattccgcaatacggctacctgacgctcaacaatggcagccaagccgtgggacgttcatccttttactgcctggaatatttcccttctcagatgctgagaacgggcaacaactttaccttcagctacacctttgaggaagtgcctttccacagcagctacgcgcacagccagagcctggaccggctgatgaatcctctcatcgaccaatacctgtattacctgaacagaactcaaaatcagtccggaagtgcccaaaacaaggacttgctgtttagccgtgggtctccagctggcatgtctgttcagcccaaaaactggctacctggaccctgttatcggcagcagcgcgtttctaaaacaaaaacagacaacaacaacagcaattttacctggactggtgcttcaaaatataacctcaatgggcgtgaatccatcatcaaccctggcactgctatggcctcacacaaagacgacgaagacaagttctttcccatgagcggtgtcatgatttttggaaaagagagcgccggagcttcaaacactgcattggacaatgtcatgattacagacgaagaggaaattaaagccactaaccctgtggccaccgaaagatttgggaccgtggcagtcaatttccagagcagcagcacagaccctgcgaccggagatgtgcatgctatgggagcattacctggcatggtgtggcaagatagagacgtgtacctgcagggtcccatttgggccaaaattcctcacacagatggacactttcacccgtctcctcttatgggcggctttggactcaagaacccgcctcctcagatcctcatcaaaaacacgcctgttcctgcgaatcctccggcggagttttcagctacaaagtttgcttcattcatcacccaatactccacaggacaagtgagtgtggaaattgaatgggagctgcagaaagaaaacagcaagcgctggaatcccgaagtgcagtacacatccaattatgcaaaatctgccaacgttgattttactgtggacaacaatggactttatactgagcctcgccccattggcacccgttaccttacccgtcccctgtaa

SEQ ID NO: 1250 - DNA, 2205 bp, Artificial Sequence
  Description of Artificial Sequence: Synthetic polynucleotide
atggctgccgatggttatcttccagattggctcgaggacaacctctdgagggcattcgcgagtggtgggacttgaaacctggagccccgaaacccaaagccaaccagcaaaagcaggacgacggccggggtdggtgcttcctggctacaagtacctcggacccttcaacggactcgacaagggggagcccgtcaacgcggcggatgcagcggccctcgagcacgacaaggcctacgaccagcagctcaaagcgggtgacaatccgtacctgcggtataaccacgccgacgccgagtttcaggagcgtctgcaagaagatacgtcttttgggggcaacctcgggcgagcagtcttccaggccaagaagagggttctcgaaccttttggtdggttgaggaaggtgctaagacggctcctggaaagaaacgtccggtagagcagtcgccacaagagccagactcctcctcgggcattggcaagacaggccagcagcccgctaaaaagagactcaattttggtcagactggcgactcagagtcagtccccgacccacaacctctcggagaacctccagcaacccccgctgctgtgggacctactacaatggcttcaggcggtggcgcaccaatggcagacaataacgaaggcgccgacggagtgggtaatgcctcaggaaattggcattgcgattccacatggctgggcgacagagtcatcaccaccagcacccgaacatgggccttgcccacctataacaaccacctctacaagcaaatctccagtgcttcaggggccagcaacgacaaccactacttcggctacagcaccccctgggggtattttgatttcaacagattccactgccatttctcaccacgtgactggcagcgactcatcaacaacaattggggattccggcccaagagactcaacttcaagctcttcaacatccaagtcaaggaggtcacgacgaatgatggcgtcacgaccatcgctaataaccttaccagcacggttcaagtcttctcggactcggagtaccagttgccgtacgtcctcggctctgcgcaccagggctgcctccctccgttcccggcggacgtgttcatgattccgcagtacggctacctaacgctcaacaatggcagccaggcagtgggacggtcatccttttactgcctggaatatttcccatcgcagatgctgagaacgggcaataactttaccttcagctacaccttcgaggacgtgcctttccacagcagctacgcgcacagccagagcctggaccggctgatgaatcctctcatcgaccagtacctgtattacctgaacagaactcagaatcagtccggaagtgcccaaaacaaggacttgctgtttagccgggggtctccagctggcatgtctgttcagcccaaaaactggctacctggaccctgttaccggcagcagcgcgtttctaaaacaaaaacagacaacaacaacagcaactttacctggactggtgcttcaaaatataaccttaatgggcgtgaatctataatcaaccctggcactgctatggcctcacacaaagacgacaaagacaagttctttcccatgagcggtgtcatgatttttggaaaggagagcgccggagcttcaaacactgcattggacaatgtcatgatcacagacgaagaggaaatcaaagccactaaccccgtggccaccgaaagatttgggactgtggcagtcaatctccagagcagcagcacagaccctgcgaccggagatgtgcatgttatgggagccttacctggaatggtgtggcaagacagagacgtatacctgcagggtcctatttgggccaaaattcctcacacggatggacactttcacccgtctcctctcatgggcggctttggacttaagcacccgcctcctcagatcctcatcaaaaacacgcctgttcctgcgaatcctccggcagagttttcggctacaaagtttgcttcattcatcacccagtattccacaggacaagtgagcgtggagattgaatgggagctgcagaaagaaaacagcaaacgctggaatcccgaagtgcagtatacatctaactatgcaaaatctgccaacgttgatttcactgtggacaacaatggactttatactgagcctcgccccattggcacccgttacctcacccgtcccctgtaa

SEQ ID NO: 1251 - DNA, 2208 bp, Artificial Sequence
  Description of Artificial Sequence: Synthetic polynucleotide
atggctgccgatggttatcttccagattggctcgaggacaacctctctgagggcattcgcgagtggtgggacttgaaacctggagccccgaaacccaaagccaaccagcaaaagcaggacgacggccggggtctggtgcttcctggctacaagtacctcggacccttcaacggactcgacaagggggagcccgtcaacgcggcggatgcagcggccctcgagcacgacaaggcctacgaccagcagctcaaagcgggtgacaatccgtacctgcggtataaccacgccgacgccgagtttcaggagcgtctgcaagaagatacgtcttttgggggcaacctcgggcgagcagtcttccaggccaagaagagggttctcgaaccttttggtctggttgaggaaggtgctaagacggctcctggaaagaaacgtccggtagagcagtcgccacaagagccagactcctcctcgggcattggcaagacaggccagcagcccgctaaaaagagactcaattttggtcagactggcgactcagagtcagtccccgacccacaacctctcggagaacctccagcaacccccgctgctgtgggacctactacaatggcttcaggcggtggcgcaccaatggcagacaataacgaaggcgccgacggagtgggtaatgcctcaggaaattggcattgcgattccacatggctgggcgacagagtcatcaccaccagcacccgaacatgggccttgcccacctataacaaccacctctacaagcaaatctccagtgcttcaggggccagcaacgacaaccactacttcggctacagcaccccctgggggtattttgatttcaacagattccactgccatttctcaccacgtgactggcagcgactcatcaacaacaattggggattccggcccaagagactcaacttcaagctcttcaacatccaagtcaaggaggtcacgacgaatgatggcgtcacgaccatcgctaataaccttaccagcacggttcaagtcttctcggactcggagtaccagttgccgtacgtcctcggctctgcgcaccagggctgcctccctccgttcccggcggacgtgttcatgattccgcagtacggctacctaacgctcaacaatggcagccaggcagtgggacggtcatccttttactgcctggaatatttcccatcgcagatgctgagaacgggcaataactttaccttcagctacaccttcgaggacgtgcctttccacagcagctacgcgcacagccagagcctggaccggctgatgaatcctctcatcgaccagtacctgtattacctgaacagaactcagaatcagtccggaagtgcccaaaacaaggacttgctgtttagccgggggtctccagctggcatgtctgttcagcccaaaaactggctacctggaccctgttaccggcagcagcgcgtttctaaaacaaaaacagacaacaacaacagcaactttacctggactggtgcttcaaaatataaccttaatgggcgtgaatctataatcaaccctggcactgctatggcctcacacaaagacgacgaagacaagttctttcccatgagcggtgtcatgatttttggaaaggagagcgccggagcttcaaacactgcattggacaatgtcatgatcacagacgaagaggaaatcaaagccactaaccccgtggccaccgaaagatttgggactgtggcagtcaatctccagagcagcagcacagaccctgcgaccggagatgtgcatgttatgggagccttacctggaatggtgtggcaagacagagacgtatacctgcagggtcctatttgggccaaaattcctcacacggatggacactttcacccgtctcctctcatgggcggctttggacttaagcacccgcctcctcagatcctcatcaaaaacacgcctgttcctgcgaatcctccggcagagttttcggctacaaagtttgcttcattcatcacccagtattccacaggacaagtgagcgtggagattgaatgggagctgcagaaagaaaacagcaaacgctggaatcccgaagtgcagtatacatctaactatgcaaaatctgccaacgttgatttcactgtggacaacaatggactttatactgagcctcgccccattggcacccgttacctcacccgtcccctgtaa

SEQ ID NO: 1252 - DNA, 2208 bp, Artificial Sequence
  Description of Artificial Sequence: Synthetic polynucleotide
atggctgccgatggttatcttccagattggctcgaggacactctctctgaaggaataagacagtggtggaagctcaaacctggcccaccaccaccaaagcccgcagagcggcataaggacgacagcaggggtcttgtgcttcctgggtacaagtacctcggacccttcaacggactcgacaagggagagccggtcaacgaggcagacgccgcggccctcgagcacgacaaagcctacgaccggcagctcgacagcggagacaacccgtacctcaagtacaaccacgccgacgcggagtttcaggagcgccttaaagaagatacgtcttttgggggcaacctcggacgagcagtcttccaggcgaaaaagagggttcttgaacctctgggcctggttgaggaacctgttaagacggctccgggaaaaaagaggccggtagagcactctcctgtggagccagactcctcctcgggaaccggaaaggcgggccagcagcctgcaagaaaaagattgaattttggtcagactggagacgcagactcagtacctgacccccagcctctcggacagccaccagcagccccctctggtctgggaactaatacgatggctacaggcagtggcgcaccaatggcagacaataacgagggcgccgacggagtgggtaattcctcgggaaattggcattgcgattccacatggatgggcgacagagtcatcaccaccagcacccgaacctgggccctgcccacctacaacaaccacctctacaaacaaatttccagccaatcaggagcctcgaacgacaatcactactttggctacagcaccccttgggggtattttgacttcaacagattccactgccacttttcaccacgtgactggcaaagactcatcaacaacaactggggattccgacccaagagactcaacttcaagctctttaacattcaagtcaaagaggtcacgcagaatgacggtacgacgacgattgccaataaccttaccagcacggttcaggtgtttactgactcggagtaccagctcccgtacgtcctcggctcggcgcatcaaggatgcctcccgccgttcccagcagacgtcttcatggtgccacagtatggatacctcaccctgaacaacgggagtcaggcagtaggacgctcttcattttactgcctggagtactttccttctcagatgctgcgtaccggaaacaactttaccttcagctacacttttgaggacgttcctttccacagcagctacgctcacagccagagtctggaccgtctcatgaatcctctcatcgaccagtacctgtattacttgagcagaacaaacactccaagtggaaccaccacgcagtcaaggcttcagttttctgtggccggacccagtaacatggctgtccagggaaggaactggcttcctggaccctgttaccgccagcagcgagtatcaaagacatctgcggataacaacaacagtgaatttgcttggactggagctaccaagtaccacctcaatggcagagactctctggtgaatccgggcccggccatggcaagccacaaggacgatgaagaaaagttttttcctcagagcggggttctcatctttgggaagcaaggctcagagaaaacaaatgtggacattgaaaaggtcatgattacagacgaagaggaaatcaggacaaccaatcccgtggctacggagcagtatggttctgtatctaccaacctccagcaacagaacacagcaccagctaccgcagatgtcaacacacaaggcgttcttccaggcatggtctggcaggacagagatgtgtaccttcaggggcccatctgggcaaagattccacacacggacggacattttcacccctctcccctcatgggtggattcggacttaaacaccctcctccacagattctcatcaagaacaccccggtacctgcgaatccttcgaccaccttcagtgcggcaaagtttgcttccttcatcacacagtactccacgggacaggtcagcgtggagatcgagtgggagctgcagaaggaaaacagcaaacgctggaatcccgaaattcagtacacttccaactacaacaagtctgttaatgtggactttactgtggacactaatggcgtgtattcagagcctcgccccattggcaccagatacctgactcgtaatctgtaa

SEQ ID NO: 1253 - protein, 735 aa, Artificial Sequence
  Description of Artificial Sequence: Synthetic polypeptide
MAADGYLPDWLEDTLSEGIRQWWKLKPGPPPPKPAERHKDDSRGLVLPGYKYLGPFNGLDKGEPVNEADAAALEHDKAYDRQLDSGDNPYLKYNHADAEFQERLKEDTSFGGNLGRAVFQAKKRVLEPLGLVEEPVKTAPGKKRPVEHSPVEPDSSSGTGKAGQQPARKRLNFGQTGDADSVPDPQPLGQPPAAPSGLGTNTMATGSGAPMADNNEGADGVGNSSGNWHCDSTWMGDRVITTSTRTWALPTYNNHLYKQISSQSGASNDNHYFGYSTPWGYFDFNRFHCHFSPRDWQRLINNNWGFRPKRLNFKLFNIQVKEVTQNDGTTTIANNLTSTVQVFTDSEYQLPYVLGSAHQGCLPPFPADVFMVPQYGYLTLNNGSQAVGRSSFYCLEYFPSQMLRTGNNFTFSYTFEDVPFHSSYAHSQSLDRLMNPLIDQYLYYLSRTNTPSGTTTQSRLQFSVAGPSNMAVQGRNWLPGPCYRQQRVSKTSADNNNSEFAWTGATKYHLNGRDSLVNPGPAMASHKDDEEKFFPQSGVLIFGKQGSEKTNVDIEKVMITDEEEIRTTNPVATEQYGSVSTNLQQQNTAPATADVNTQGVLPGMVWQDRDVYLQGPIWAKIPHTDGHFHPSPLMGGFGLKHPPPQILIKNTPVPANPSTTFSAAKFASFITQYSTGQVSVEIEWELQKENSKRWNPEIQYTSNYNKSVNVDFTVDTNGVYSEPRPIGTRYLTRNL

SEQ ID NO: 1254 - DNA, 2208 bp, Artificial Sequence
  Description of Artificial Sequence: Synthetic polynucleotide
atggctgccgatggttatcttccagattggctcgaggacactctctctgaaggaataagacagtggtggaagctcaaacctggcccaccaccaccaaagcccgcagagcggcataaggacgacagcaggggtcttgtgcttcctgggtacaagtacctcggacccttcaacggactcgacaagggagagccggtcaacgaggcagacgccgcggccctcgagcacgacaaagcctacgaccggcagctcgacagcggagacaacccgtacctcaagtacaaccacgccgacgcggagtttcaggagcgccttaaagaagatacgtcttttgggggcaacctcggacgagcagtcttccaggcgaaaaagaggattcttgaacctctgggcctggttgaggaacctgttaagacggctccgggaaaaaagaggccggtagagcactctcctgcggagccagactcctcctcgggaaccggaaagtcgggccagcagcctgcaagaaaaagattgaattttggtcagactggagacgcagactcagtacctgacccccagcctctcggacagccaccagcagccccctctggtctgggaactaatacgatggcttcaggcagtggcgcaccaatggcagacaataacgagggcgccgacggagtgggtaattcctcgggaaattggcattgcgattccacatggatgggcgacagagtcatcaccaccagcacccgaacctgggccctgcccacctacaacaaccacctctacaaacaaatttccagccaatcaggagcctcgaacgacaatcactactttggctacagcaccccttgggggtattttgacttcaacagattccactgccacttttcaccacgtgactggcaaagactcatcaacaacaactggggattccgacccaagagactcagcttcaagctctttaacattcaagtcaaagaggtcacgcagaatgacggtacgacgacgattgccaataaccttaccagcacggttcaggtgtttactgactcggagtaccagctcccgtacgtcctcggctcggcgcatcaaggatgcctcccgccgttcccagcagacgtcttcatggtgccacagtatggatacctcaccctgaacaacgggagtcaggcagtaggacgctcttcattttactgcctggagtactttccttctcagatgctgcgtaccggaaacaactttaccttcagctacacttttgaggacgttcctttccacagcagctacgctcacagccagagtctggaccgtctcatgaatcctctcatcgaccagtacctgtattacttgagcagaacaaacactccaagtggaaccaccacgatgtcaaggcttcagttttctcaggccggagcgagtgacattcgggaccagtctaggaactggcttcctggaccctgttaccgccagcagcgagtatcaaagacagctgcggataacaacaacagtgattactcgtggactggagctaccaagtaccacctcaatggcagagactctctggtgaatccgggcccggccatggcaagccacaaggacgatgaagaaaagtattttcctcagagcggggttctcatctttgggaagcaagactcaggaaaaacaaatgtggacattgaaaaggtcatgattacagacgaagaggaaatcaggacaaccaatcccgtggctacggagcagtatggttctgtatctaccaacctccagagcggcaacacacaagcagctacctcagatgtcaacacacaaggcgttcttccaggcatggtctggcaggacagagatgtgtaccttcaggggcccatctgggcaaagattccacacacggacggacattttcacccctctcccctcatgggtggattcggacttaaacaccctcctccacagattctcatcaagaacaccccggtacctgcgaatccttcgaccaccttcagtgcggcaaagtttgcttccttcatcacacagtactccacgggacaggtcagcgtggagatcgagtgggagctgcagaaggaaaacagcaaacgctggaatcccgaaattcagtacacttccaactacaacaagtctgttaatgtggactttactgtggacactaatggcgtgtattcagagcctcgccccattggcaccagatacctgactcgtaatctgtaa

SEQ ID NO: 1255 - DNA, 2208 bp, Artificial Sequence
  Description of Artificial Sequence: Synthetic polynucleotide
atggctgccgatggttatcttccagattggctcgaggacactctctctgaaggaataagacagtggtggaagctcaaacctggcccaccaccaccaaagcccgcagagcggcataaggacgacagcaggggtcttgtgcttcctgggtacaagtacctcggacccttcaacggactcgacaagggagagccggtcaacgaggcagacgccgcggccctcgagcacgacaaagcctacgaccggcagctcgacagcggagacaacccgtacctcaagtacaaccacgccgacgcggagtttcaggagcgccttaaagaagatacgtcttttgggggcaacctcggacgagcagtcttccaggcgaaaaagaggattcttgaacctctgggcctggttgaggaacctgttaagacggctccgggaaaaaagaggccggtagagcactctcctgcggagccagactcctcctcgggaaccggaaagtcgggccagcagcctgcaagaaaaagattgaattttggtcagactggagacgcagactcagtacctgacccccagcctctcggacagccaccagcagccccctctggtctgggaactaatacgatggcttcaggcagtggcgcaccaatggcagacaataacgagggcgccgacggagtgggtaattcctcgggaaattggcattgcgattccacatggatgggcgacagagtcatcaccaccagcacccgaacctgggccctgcccacctacaacaaccacctctacaaacaaatttccagccaatcaggagcctcgaacgacaatcactactttggctacagcaccccttgggggtattttgacttcaacagattccactgccacttttcaccacgtgactggcaaagactcatcaacaacaactggggattccgacccaagagactcaacttcaagctctttaacattcaagtcaaagaggtcacgcagaatgacggtacgacgacgattgccaataaccttaccagcacggttcaggtgtttactgactcggagtaccagctcccgtacgtcctcggctcggcgcatcaaggatgcctcccgccgttcccagcagacgtcttcatggtgccacagtatggatacctcaccctgaacaacgggagtcaggcagtaggacgctcttcattttactgcctggagtactttccttctcagatgctgcgtaccggaaacaactttaccttcagctacacttttgaggacgttcctttccacagcagctacgctcacagccagagtctggaccgtctcatgaatcctctcatcgaccagtacctgtattacttgagcagaacaaacactccaagtggaaccaccacgatgtcaaggcttcagttttctcaggccggagcgagtgacattcgggaccagtctaggaactggcttcctggaccctgttaccgccagcagcgagtatcaaagacagctgcggataacaacaacagtgattactcgtggactggagctaccaagtaccacctcaatggcagagactctctggtgaatccgggcccggccatggcaagccacaaggacgatgaagaaaagtattttcctcagagcggggttctcatctttgggaagcaagactcaggaaaaacaaatgtggacattgaaaaggtcatgattacagacgaagaggaaatcaggacaaccaatcccgtggctacggagcagtatggttctgtatctaccaacctccagagcggcaacacacaagcagctacctcagatgtcaacacacaaggcgttcttccaggcatggtctggcaggacagagatgtgtaccttcaggggcccatctgggcaaagattccacacacggacggacattttcacccctctcccctcatgggtggattcggacttaaacaccctcctccacagattctcatcaagaacaccccggtacctgcgaatccttcgaccaccttcagtgcggcaaagtttgcttccttcatcacacagtactccacgggacaggtcagcgtggagatcgagtgggagctgcagaaggaaaacagcaaacgctggaatcccgaaattcagtacacttccaactacaacaagtctgttaatgtggactttactgtggacactaatggcgtgtattcagagcctcgccccattggcaccagatacctgactcgtaatctgtaa

SEQ ID NO: 1256 - protein, 735 aa, Artificial Sequence
  Description of Artificial Sequence: Synthetic polypeptide
MAADGYLPDWLEDTLSEGIRQWWKLKPGPPPPKPAERHKDDSRGLVLPGYKYLGPFNGLDKGEPVNEADAAALEHDKAYDRQLDSGDNPYLKYNHADAEFQERLKEDTSFGGNLGRAVFQAKKRILEPLGLVEEPVKTAPGKKRPVEHSPAEPDSSSGTGKSGQQPARKRLNFGQTGDADSVPDPQPLGQPPAAPSGLGTNTMASGSGAPMADNNEGADGVGNSSGNWHCDSTWMGDRVITTSTRTWALPTYNNHLYKQISSQSGASNDNHYFGYSTPWGYFDFNRFHCHFSPRDWQRLINNNWGFRPKRLNFKLFNIQVKEVTQNDGTTTIANNLTSTVQVFTDSEYQLPYVLGSAHQGCLPPFPADVFMVPQYGYLTLNNGSQAVGRSSFYCLEYFPSQMLRTGNNFTFSYTFEDVPFHSSYAHSQSLDRLMNPLIDQYLYYLSRTNTPSGTTTMSRLQFSQAGASDIRDQSRNWLPGPCYRQQRVSKTAADNNNSDYSWTGATKYHLNGRDSLVNPGPAMASHKDDEEKYFPQSGVLIFGKQDSGKTNVDIEKVMITDEEEIRTTNPVATEQYGSVSTNLQSGNTQAATSDVNTQGVLPGMVWQDRDVYLQGPIWAKIPHTDGHFHPSPLMGGFGLKHPPPQILIKNTPVPANPSTTFSAAKFASFITQYSTGQVSVEIEWELQKENSKRWNPEIQYTSNYNKSVNVDFTVDTNGVYSEPRPIGTRYLTRNL

SEQ ID NO: 1257 - protein, 736 aa, Artificial Sequence
  Description of Artificial Sequence: Synthetic polypeptide
MAADGYLPDWLEDNLSEGIREWWDLKPGAPKPKANQQKQDDGRGLVLPGYKYLGPFNGLDKGEPVNAADAAALEHDKAYDQQLKAGDNPYLRYNHADAEFQERLQEDTSFGGNLGRAVFQAKKRVLEPFGLVEEGAKTAPGKKRPVEQSPQEPDSSSGIGKTGQQPAKKRLNFGQTGDSESVPDPQPLGEPPATPAAVGPTTMASGGGAPMADNNEGADGVGNASGNWHCDSTWLGDRVITTSTRTWALPTYNNHLYKQISSASTGASNDNHYFGYSTPWGYFDFNRFHCHFSPRDWQRLINNNWGFRPKRLNFKLFNIQVKEVTTNDGVTTIANNLTSTVQVFSDSEYQLPYVLGSAHQGCLPPFPADVFMIPQYGYLTLNNGSQAVGRSSFYCLEYFPSQMLRTGNNFTFSYTFEDVPFHSSYAHSQSLDRLMNPLIDQYLYFLNRTQNQSGSAQNKDLLFSRGSPAGMSVQPKNWLPGPCYRQQRVSKTKTDNNNSNFTWTGASKYNLNGRESIINPGTAMASHKDDKDKFFPMSGVMIFGKESAGASNTALDNVMITDEEEIKATNPVATERFGTVAVNLQSSSTDPATGDVHVMGALPGMVWQDRDVYLQGPIWAKIPHTDGHFHPSPLMGGFGLKHPPPQILIKNTPVPANPPAEFSATKFASFITQYSTGQVSVEIEWELQKENSKRWNPEVQYTSNYAKSANVDFTVDNNGLYTEPRPIGTRYLTRPL

SEQ ID NO: 1258 - protein, 747 aa, Artificial Sequence
  Description of Artificial Sequence: Synthetic polypeptide
MAADGYLPDWLEDTLSEGIRQWWKLKPGPPPPKPAERHKDDSRGLVLPGYKYLGPFNGLDKGEPVNEADAAALEHDKAYDRQLDSGDNPYLKYNHADAEFQERLKEDTSFGGNLGRAVFQAKKRVLEPLGLVEEPVKTAPGKKRPVEHSPVEPDSSSGTGKAGQQPARKRLNFGQTGDADSVPDPQPLGQPPAAPSGLGTNTMATGSGAPMADNNEGADGVGNSSGNWHCDSTWMGDRVITTSTRTWALPTYNNHLYKQISSQSGASNDNHYFGYSTPWGYFDFNRFHCHFSPRDWQRLINNNWGFRPKRLNFKLFNIQVKEVTQNDGTTTIANNLTSTVQVFTDSEYQLPYVLGSAHQGCLPPFPADVFMVPQYGYLTLNNGSQAVGRSSFYCLEYFPSQMLRTGNNFTFSYTFEDVPFHSSYAHSQSLDRLMNPLIDQYLYYLSRTNTPSGTTTQSRLQFSQAGASDIRDQSRNWLPGPCYRQQRVSKTSADNNNSEYSWTGATKYHLNGRDSLVNPGPAMASHKDDEEKFFPQSGVLIFGKQGSEKTNVDIEKVMITDEEEIRTTNPVATEQYGSVSTNLQRGNAAAGSTPPPMAARQAATADVNTQGVLPGMVWQDRDVYLQGPIWAKIPHTDGHFHPSPLMGGFGLKHPPPQILIKNTPVPANPSTTFSAAKFASFITQYSTGQVSVEIEWELQKENSKRWNPEIQYTSNYNKSVNVDFTVDTNGVYSEPRPIGTRYLTRNL

SEQ ID NO: 1259 - protein, 747 aa, Artificial Sequence
  Description of Artificial Sequence: Synthetic polypeptide
MAADGYLPDWLEDTLSEGIRQWWKLKPGPPPPKPAERHKDDSRGLVLPGYKYLGPFNGLDKGEPVNEADAAALEHDKAYDRQLDSGDNPYLKYNHADAEFQERLKEDTSFGGNLGRAVFQAKKRVLEPLGLVEEPVKTAPGKKRPVEHSPVEPDSSSGTGKAGQQPARKRLNFGQTGDADSVPDPQPLGQPPAAPSGLGTNTMATGSGAPMADNNEGADGVGNSSGNWHCDSTWMGDRVITTSTRTWALPTYNNHLYKQISSQSGASNDNHYFGYSTPWGYFDFNRFHCHFSPRDWQRLINNNWGFRPKRLNFKLFNIQVKEVTQNDGTTTIANNLTSTVQVFTDSEYQLPYVLGSAHQGCLPPFPADVFMVPQYGYLTLNNGSQAVGRSSFYCLEYFPSQMLRTGNNFTFSYTFEDVPFHSSYAHSQSLDRLMNPLIDQYLYYLSRTNTPSGTTTQSRLQFSQAGASDIRDQSRNWLPGPCYRQQRVSKTSADNNNSEYSWTGATKYHLNGRDSLVNPGPAMASHKDDEEKFFPQSGVLIFGKQGSEKTNVDIEKVMITDEEEIRTTNPVATEQYGSVSTNLQRGNAAAGETRAPLAARQAATADVNTQGVLPGMVWQDRDVYLQGPIWAKIPHTDGHFHPSPLMGGFGLKHPPPQILIKNTPVPANPSTTFSAAKFASFITQYSTGQVSVEIEWELQKENSKRWNPEIQYTSNYNKSVNVDFTVDTNGVYSEPRPIGTRYLTRNL

SEQ ID NO: 1260 - protein, 7 aa, Artificial Sequence
  Description of Artificial Sequence: Synthetic peptide
TLAVPFK

SEQ ID NO: 1261 - protein, 7 aa, Artificial Sequence
  Description of Artificial Sequence: Synthetic peptide
KFPVALT

SEQ ID NO: 1262 - protein, 6 aa, Artificial Sequence
  Description of Artificial Sequence: Synthetic peptide
LAVPFK

SEQ ID NO: 1263 - protein, 5 aa, Artificial Sequence
  Description of Artificial Sequence: Synthetic peptide
AVPFK

SEQ ID NO: 1264 - protein, 4 aa, Artificial Sequence
  Description of Artificial Sequence: Synthetic peptide
VPFK

SEQ ID NO: 1265 - protein, 6 aa, Artificial Sequence
  Description of Artificial Sequence: Synthetic peptide
TLAVPF

SEQ ID NO: 1266 - protein, 5 aa, Artificial Sequence
  Description of Artificial Sequence: Synthetic peptide
TLAVP

SEQ ID NO: 1267 - protein, 4 aa, Artificial Sequence
  Description of Artificial Sequence: Synthetic peptide
TLAV

SEQ ID NO: 1268 - protein, 7 aa, Artificial Sequence
  Description of Artificial Sequence: Synthetic peptide
SVSKPFL

SEQ ID NO: 1269 - protein, 7 aa, Artificial Sequence
  Description of Artificial Sequence: Synthetic peptide
FTLTTPK

SEQ ID NO: 1270 - protein, 7 aa, Artificial Sequence
  Description of Artificial Sequence: Synthetic peptide
MNATKNV

SEQ ID NO: 1271 - protein, 7 aa, Artificial Sequence
  Description of Artificial Sequence: Synthetic peptide
QSSQTPR

SEQ ID NO: 1272 - protein, 7 aa, Artificial Sequence
  Description of Artificial Sequence: Synthetic peptide
ILGTGTS

SEQ ID NO: 1273 - protein, 7 aa, Artificial Sequence
  Description of Artificial Sequence: Synthetic peptide
TRTNPEA

SEQ ID NO: 1274 - protein, 7 aa, Artificial Sequence
  Description of Artificial Sequence: Synthetic peptide
NGGTSSS

SEQ ID NO: 1275 - protein, 7 aa, Artificial Sequence
  Description of Artificial Sequence: Synthetic peptide
YTLSQGW

SEQ ID NO: 1276 - DNA, 21 bp, Artificial Sequence
  Description of Artificial Sequence: Synthetic oligonucleotide
aagtttcctgtggcgttgact

SEQ ID NO: 1277 - DNA, 21 bp, Artificial Sequence
  Description of Artificial Sequence: Synthetic oligonucleotide
actttggcggtgccttttaag

SEQ ID NO: 1278 - DNA, 21 bp, Artificial Sequence
  Description of Artificial Sequence: Synthetic oligonucleotide
agtgtgagtaagccttttttg

SEQ ID NO: 1279 - DNA, 21 bp, Artificial Sequence
  Description of Artificial Sequence: Synthetic oligonucleotide
tttacgttgacgacgcctaag

SEQ ID NO: 1280 - DNA, 21 bp, Artificial Sequence
  Description of Artificial Sequence: Synthetic oligonucleotide
atgaatgctacgaagaatgtg

SEQ ID NO: 1281 - DNA, 21 bp, Artificial Sequence
  Description of Artificial Sequence: Synthetic oligonucleotide
cagtcgtcgcagacgcctagg

SEQ ID NO: 1282 - DNA, 21 bp, Artificial Sequence
  Description of Artificial Sequence: Synthetic oligonucleotide
attctggggactggtacttcg

SEQ ID NO: 1283 - DNA, 21 bp, Artificial Sequence
  Description of Artificial Sequence: Synthetic oligonucleotide
acgcggactaatcctgaggct

SEQ ID NO: 1284 - DNA, 21 bp, Artificial Sequence
  Description of Artificial Sequence: Synthetic oligonucleotide
aatggggggactagtagttct

SEQ ID NO: 1285 - DNA, 21 bp, Artificial Sequence
  Description of Artificial Sequence: Synthetic oligonucleotide
tatactttgtcgcagggttgg

SEQ ID NO: 1286 - protein, 11 aa, Artificial Sequence
  Description of Artificial Sequence: Synthetic peptide
AQTLAVPFKAQ

SEQ ID NO: 1287 - protein, 11 aa, Artificial Sequence
  Description of Artificial Sequence: Synthetic peptide
AQSVSKPFLAQ

SEQ ID NO: 1288 - protein, 11 aa, Artificial Sequence
  Description of Artificial Sequence: Synthetic peptide
AQFTLTTPKAQ

SEQ ID NO: 1289 - protein, 11 aa, Artificial Sequence
  Description of Artificial Sequence: Synthetic peptide
DGTLAVPFKAQ

SEQ ID NO: 1290 - protein, 11 aa, Artificial Sequence
  Description of Artificial Sequence: Synthetic peptide
ESTLAVPFKAQ

SEQ ID NO: 1291 - protein, 11 aa, Artificial Sequence
  Description of Artificial Sequence: Synthetic peptide
GGTLAVPFKAQ

SEQ ID NO: 1292 - protein, 11 aa, Artificial Sequence
  Description of Artificial Sequence: Synthetic peptide
AQTLATPFKAQ

SEQ ID NO: 1293 - protein, 11 aa, Artificial Sequence
  Description of Artificial Sequence: Synthetic peptide
ATTLATPFKAQ

SEQ ID NO: 1294 - protein, 11 aa, Artificial Sequence
  Description of Artificial Sequence: Synthetic peptide
DGTLATPFKAQ

SEQ ID NO: 1295 - protein, 11 aa, Artificial Sequence
  Description of Artificial Sequence: Synthetic peptide
GGTLATPFKAQ

SEQ ID NO: 1296 - protein, 11 aa, Artificial Sequence
  Description of Artificial Sequence: Synthetic peptide
SGSLAVPFKAQ

SEQ ID NO: 1297 - protein, 11 aa, Artificial Sequence
  Description of Artificial Sequence: Synthetic peptide
AQTLAQPFKAQ

SEQ ID NO: 1298 - protein, 11 aa, Artificial Sequence
  Description of Artificial Sequence: Synthetic peptide
AQTLQQPFKAQ

SEQ ID NO: 1299 - protein, 11 aa, Artificial Sequence
  Description of Artificial Sequence: Synthetic peptide
AQTLSNPFKAQ

SEQ ID NO: 1300 - protein, 11 aa, Artificial Sequence
  Description of Artificial Sequence: Synthetic peptide
AQTLAVPFSNP

SEQ ID NO: 1301 - protein, 11 aa, Artificial Sequence
  Description of Artificial Sequence: Synthetic peptide
QGTLAVPFKAQ

SEQ ID NO: 1302 - protein, 11 aa, Artificial Sequence
  Description of Artificial Sequence: Synthetic peptide
NQTLAVPFKAQ

SEQ ID NO: 1303 - protein, 11 aa, Artificial Sequence
  Description of Artificial Sequence: Synthetic peptide
EGSLAVPFKAQ

SEQ ID NO: 1304 - protein, 11 aa, Artificial Sequence
  Description of Artificial Sequence: Synthetic peptide
SGNLAVPFKAQ

SEQ ID NO: 1305 - protein, 11 aa, Artificial Sequence
  Description of Artificial Sequence: Synthetic peptide
EGTLAVPFKAQ

SEQ ID NO: 1306 - protein, 11 aa, Artificial Sequence
  Description of Artificial Sequence: Synthetic peptide
DSTLAVPFKAQ

SEQ ID NO: 1307 - protein, 11 aa, Artificial Sequence
  Description of Artificial Sequence: Synthetic peptide
AVTLAVPFKAQ

SEQ ID NO: 1308 - protein, 11 aa, Artificial Sequence
  Description of Artificial Sequence: Synthetic peptide
AQTLSTPFKAQ

SEQ ID NO: 1309 - protein, 11 aa, Artificial Sequence
  Description of Artificial Sequence: Synthetic peptide
AQTLPQPFKAQ

SEQ ID NO: 1310 - protein, 11 aa, Artificial Sequence
  Description of Artificial Sequence: Synthetic peptide
AQTLSQPFKAQ

SEQ ID NO: 1311 - protein, 11 aa, Artificial Sequence
  Description of Artificial Sequence: Synthetic peptide
AQTLQLPFKAQ

SEQ ID NO: 1312 - protein, 11 aa, Artificial Sequence
  Description of Artificial Sequence: Synthetic peptide
AQTLTMPFKAQ

SEQ ID NO: 1313 - protein, 11 aa, Artificial Sequence
  Description of Artificial Sequence: Synthetic peptide
AQTLTTPFKAQ

SEQ ID NO: 1314 - protein, 11 aa, Artificial Sequence
  Description of Artificial Sequence: Synthetic peptide
AQYTLSQGWAQ

SEQ ID NO: 1315 - protein, 11 aa, Artificial Sequence
  Description of Artificial Sequence: Synthetic peptide
AQMNATKNVAQ

SEQ ID NO: 1316 - protein, 11 aa, Artificial Sequence
  Description of Artificial Sequence: Synthetic peptide
AQVSGGHHSAQ

SEQ ID NO: 1317 - protein, 11 aa, Artificial Sequence
  Description of Artificial Sequence: Synthetic peptide
AQTLTAPFKAQ

SEQ ID NO: 1318 - protein, 11 aa, Artificial Sequence
  Description of Artificial Sequence: Synthetic peptide
AQTLSKPFKAQ

SEQ ID NO: 1319 - protein, 7 aa, Artificial Sequence
  Description of Artificial Sequence: Synthetic peptide
QAVRTSL

SEQ ID NO: 1320 - protein, 7 aa, Artificial Sequence
  Description of Artificial Sequence: Synthetic peptide
LAKERLS

SEQ ID NO: 1321 - protein, 7 aa, Artificial Sequence
  Description of Artificial Sequence: Synthetic peptide
MNSTKNV

SEQ ID NO: 1322 - protein, 7 aa, Artificial Sequence
  Description of Artificial Sequence: Synthetic peptide
VSGGHHS

SEQ ID NO: 1323 - protein, 14 aa, Artificial Sequence
  Description of Artificial Sequence: Synthetic peptide
SAQTLAVPFKAQAQ

SEQ ID NO: 1324 - protein, 14 aa, Artificial Sequence
  Description of Artificial Sequence: Synthetic peptide
  MOD_RES (2)..(4): Any amino acid
SXXXLAVPFKAQAQ

SEQ ID NO: 1325 - protein, 14 aa, Artificial Sequence
  Description of Artificial Sequence: Synthetic peptide
  MOD_RES (4)..(6): Any amino acid
SAQXXXVPFKAQAQ

SEQ ID NO: 1326 - protein, 14 aa, Artificial Sequence
  Description of Artificial Sequence: Synthetic peptide
  MOD_RES (6)..(8): Any amino acid
SAQTLXXXFKAQAQ

SEQ ID NO: 1327 - protein, 14 aa, Artificial Sequence
  Description of Artificial Sequence: Synthetic peptide
  MOD_RES (8)..(10): Any amino acid
SAQTLAVXXXAQAQ

SEQ ID NO: 1328 - protein, 14 aa, Artificial Sequence
  Description of Artificial Sequence: Synthetic peptide
  MOD_RES (10)..(12): Any amino acid
SAQTLAVPFXXXAQ

SEQ ID NO: 1329 - protein, 7 aa, Artificial Sequence
  Description of Artificial Sequence: Synthetic peptide
TNHQSAQ

SEQ ID NO: 1330 - protein, 7 aa, Artificial Sequence
  Description of Artificial Sequence: Synthetic peptide
AQAQTGW

SEQ ID NO: 1331 - protein, 9 aa, Artificial Sequence
  Description of Artificial Sequence: Synthetic peptide
DGTLATPFK

SEQ ID NO: 1332 - protein, 11 aa, Artificial Sequence
  Description of Artificial Sequence: Synthetic peptide
  MOD_RES (10)..(11): Any amino acid
DGTLATPFKXX

SEQ ID NO: 1333 - protein, 8 aa, Artificial Sequence
  Description of Artificial Sequence: Synthetic peptide
LAVPFKAQ

SEQ ID NO: 1334 - protein, 6 aa, Artificial Sequence
  Description of Artificial Sequence: Synthetic peptide
VPFKAQ

SEQ ID NO: 1335 - protein, 4 aa, Artificial Sequence
  Description of Artificial Sequence: Synthetic peptide
FKAQ

SEQ ID NO: 1336 - protein, 6 aa, Artificial Sequence
  Description of Artificial Sequence: Synthetic peptide
AQTLAV

SEQ ID NO: 1337 - protein, 8 aa, Artificial Sequence
  Description of Artificial Sequence: Synthetic peptide
AQTLAVPF

SEQ ID NO: 1338 - protein, 4 aa, Artificial Sequence
  Description of Artificial Sequence: Synthetic peptide
QAVR

SEQ ID NO: 1339 - protein, 4 aa, Artificial Sequence
  Description of Artificial Sequence: Synthetic peptide
AVRT

SEQ ID NO: 1340 - protein, 4 aa, Artificial Sequence
  Description of Artificial Sequence: Synthetic peptide
VRTS

SEQ ID NO: 1341 - protein, 4 aa, Artificial Sequence
  Description of Artificial Sequence: Synthetic peptide
RTSL

SEQ ID NO: 1342 - protein, 5 aa, Artificial Sequence
  Description of Artificial Sequence: Synthetic peptide
QAVRT

SEQ ID NO: 1343 - protein, 5 aa, Artificial Sequence
  Description of Artificial Sequence: Synthetic peptide
AVRTS

SEQ ID NO: 1344 - protein, 5 aa, Artificial Sequence
  Description of Artificial Sequence: Synthetic peptide
VRTSL

SEQ ID NO: 1345 - protein, 6 aa, Artificial Sequence
  Description of Artificial Sequence: Synthetic peptide
QAVRTS

SEQ ID NO: 1346 - protein, 6 aa, Artificial Sequence
  Description of Artificial Sequence: Synthetic peptide
AVRTSL

SEQ ID NO: 1347 - DNA, 33 bp, Artificial Sequence
  Description of Artificial Sequence: Synthetic oligonucleotide
gatgggactttggcggtgccttttaaggcacag

SEQ ID NO: 1348 - DNA, 33 bp, Artificial Sequence
  Description of Artificial Sequence: Synthetic oligonucleotide
gatgggacgttggcggtgccttttaaggcacag

SEQ ID NO: 1349 - DNA, 21 bp, Artificial Sequence
  Description of Artificial Sequence: Synthetic oligonucleotide
caggcggttaggacgtctttg

SEQ ID NO: 1350 - DNA, 27 bp, Artificial Sequence
  Description of Artificial Sequence: Synthetic oligonucleotide
caggtcttcacggactcagactatcag

SEQ ID NO: 1351 - DNA, 32 bp, Artificial Sequence
  Description of Artificial Sequence: Synthetic oligonucleotide
caagtaaaacctctacaaatgtggtaaaatcg

SEQ ID NO: 1352 - DNA, 36 bp, Artificial Sequence
  Description of Artificial Sequence: Synthetic oligonucleotide
actcatcgaccaatacttgtactatctctctagaac

SEQ ID NO: 1353 - DNA, 26 bp, Artificial Sequence
  Description of Artificial Sequence: Synthetic oligonucleotide
ggaagtattccttggttttgaaccca

SEQ ID NO: 1354 - DNA, 23 bp, Artificial Sequence
  Description of Artificial Sequence: Synthetic oligonucleotide
ggtcgcggttcttgtttgtggat

SEQ ID NO: 1355 - DNA, 24 bp, Artificial Sequence
  Description of Artificial Sequence: Synthetic oligonucleotide
cgaccttgaagcgcatgaactcct

SEQ ID NO: 1356 - DNA, 83 bp, Artificial Sequence
  Description of Artificial Sequence: Synthetic oligonucleotide
  modified_base (42)..(43): a, c, g, or t
  modified_base (45)..(46): a, c, g, or t
  modified_base (48)..(49): a, c, g, or t
  modified_base (51)..(52): a, c, g, or t
  modified_base (54)..(55): a, c, g, or t
  modified_base (57)..(58): a, c, g, or t
  modified_base (60)..(61): a, c, g, or t
gtattccttggttttgaacccaaccggtctgcgcctgtgcmnnmnnmnnmnnmnnmnnmnnttgggcactctggtggtttgtc

SEQ ID NO: 1357 - DNA, 64 bp, Artificial Sequence
  Description of Artificial Sequence: Synthetic oligonucleotide
  modified_base (36)..(37): a, c, g, or t
  modified_base (39)..(40): a, c, g, or t
  modified_base (42)..(43): a, c, g, or t
gtattccttggttttgaacccaaccggtctgcgcmnnmnnmnnaaaaggcaccgccaaagtttg

SEQ ID NO: 1358 - DNA, 70 bp, Artificial Sequence
  Description of Artificial Sequence: Synthetic oligonucleotide
  modified_base (42)..(43): a, c, g, or t
  modified_base (45)..(46): a, c, g, or t
  modified_base (48)..(49): a, c, g, or t
gtattccttggttttgaacccaaccggtctgcgcctgtgcmnnmnnmnncaccgccaaagtttgggcact

SEQ ID NO: 1359 - DNA, 77 bp, Artificial Sequence
  Description of Artificial Sequence: Synthetic oligonucleotide
  modified_base (48)..(49): a, c, g, or t
  modified_base (51)..(52): a, c, g, or t
  modified_base (54)..(55): a, c, g, or t
gtattccttggttttgaacccaaccggtctgcgcctgtgccttaaamnnmnnmnncaaagtttgggcactctggtgg

SEQ ID NO: 1360 - DNA, 83 bp, Artificial Sequence
  Description of Artificial Sequence: Synthetic oligonucleotide
  modified_base (54)..(55): a, c, g, or t
  modified_base (57)..(58): a, c, g, or t
  modified_base (60)..(61): a, c, g, or t
gtattccttggttttgaacccaaccggtctgcgcctgtgccttaaaaggcacmnnmnnmnnttgggcactctggtggtttgtg

SEQ ID NO: 1361 - DNA, 21 bp, Artificial Sequence
  Description of Artificial Sequence: Synthetic oligonucleotide
cttgcgaaggagcggctttcg

SEQ ID NO: 1362 - protein, 10 aa, Artificial Sequence
  Description of Artificial Sequence: Synthetic peptide
VNLTWSRASG

SEQ ID NO: 1363 - protein, 14 aa, Artificial Sequence
  Description of Artificial Sequence: Synthetic peptide
EFCINHRGYWVCGD

SEQ ID NO: 1364 - protein, 11 aa, Artificial Sequence
  Description of Artificial Sequence: Synthetic peptide
EDGQVMDVDLS

SEQ ID NO: 1365 - protein, 9 aa, Artificial Sequence
  Description of Artificial Sequence: Synthetic peptide
EKQRNGTLT

SEQ ID NO: 1366 - protein, 17 aa, Artificial Sequence
  Description of Artificial Sequence: Synthetic peptide
TYQCRVTHPHLPRALMR

SEQ ID NO: 1367 - protein, 14 aa, Artificial Sequence
  Description of Artificial Sequence: Synthetic peptide
RHSTTQPRKTKGSG

SEQ ID NO: 1368 - protein, 13 aa, Artificial Sequence
  Description of Artificial Sequence: Synthetic peptide
DSNPRGVSAYLSR

SEQ ID NO: 1369 - protein, 12 aa, Artificial Sequence
  Description of Artificial Sequence: Synthetic peptide
TITCLWDLAPSK

SEQ ID NO: 1370 - protein, 10 aa, Artificial Sequence
  Description of Artificial Sequence: Synthetic peptide
KTKGSGFFVF

SEQ ID NO: 1371 - protein, 12 aa, Artificial Sequence
  Description of Artificial Sequence: Synthetic peptide
THPHLPRALMRS

SEQ ID NO: 1372 - protein, 23 aa, Artificial Sequence
  Description of Artificial Sequence: Synthetic peptide
GETYQCRVTHPHLPRALMRSTTK

SEQ ID NO: 1373 - protein, 8 aa, Artificial Sequence
  Description of Artificial Sequence: Synthetic peptide
LPRALMRS

SEQ ID NO: 1374 - protein, 8 aa, Artificial Sequence
  Description of Artificial Sequence: Synthetic peptide
INHRGYWV

SEQ ID NO: 1375 - protein, 12 aa, Artificial Sequence
  Description of Artificial Sequence: Synthetic peptide
CDAGSVRTNAPD

SEQ ID NO: 1376 - protein, 17 aa, Artificial Sequence
  Description of Artificial Sequence: Synthetic peptide
AKAVSNLTESRSESLQS

SEQ ID NO: 1377 - protein, 13 aa, Artificial Sequence
  Description of Artificial Sequence: Synthetic peptide
SLTGDEFKKVLET

SEQ ID NO: 1378 - protein, 11 aa, Artificial Sequence
  Description of Artificial Sequence: Synthetic peptide
REAVAYRFEED

SEQ ID NO: 1379 - protein, 10 aa, Artificial Sequence
  Description of Artificial Sequence: Synthetic peptide
INPEIITLDG

SEQ ID NO: 1380 - protein, 15 aa, Artificial Sequence
  Description of Artificial Sequence: Synthetic peptide
DISVTGAPVITATYL

SEQ ID NO: 1381 - protein, 12 aa, Artificial Sequence
  Description of Artificial Sequence: Synthetic peptide
DISVTGAPVITA

SEQ ID NO: 1382 - protein, 17 aa, Artificial Sequence
  Description of Artificial Sequence: Synthetic peptide
PKTVSNLTESSSESVQS

SEQ ID NO: 1383 - protein, 13 aa, Artificial Sequence
  Description of Artificial Sequence: Synthetic peptide
SLMGDEFKAVLET

SEQ ID NO: 1384 - protein, 11 aa, Artificial Sequence
  Description of Artificial Sequence: Synthetic peptide
QHSVAYTFEED

SEQ ID NO: 1385 - protein, 10 aa, Artificial Sequence
  Description of Artificial Sequence: Synthetic peptide
INPEIITRDG

SEQ ID NO: 1386 - protein, 15 aa, Artificial Sequence
  Description of Artificial Sequence: Synthetic peptide
DISLTGDPVITASYL

SEQ ID NO: 1387 - protein, 12 aa, Artificial Sequence
  Description of Artificial Sequence: Synthetic peptide
DISLTGDPVITA

SEQ ID NO: 1388 - protein, 11 aa, Artificial Sequence
  Description of Artificial Sequence: Synthetic peptide
DQSIDFEIDSA

SEQ ID NO: 1389 - protein, 20 aa, Artificial Sequence
  Description of Artificial Sequence: Synthetic peptide
KNVSEDLPLPTFSPTLLGDS

SEQ ID NO: 1390 - protein, 11 aa, Artificial Sequence
  Description of Artificial Sequence: Synthetic peptide
KNVSEDLPLPT

SEQ ID NO: 1391 - protein, 12 aa, Artificial Sequence
  Description of Artificial Sequence: Synthetic peptide
CDSGRVRTDAPD

SEQ ID NO: 1392 - protein, 14 aa, Artificial Sequence
  Description of Artificial Sequence: Synthetic peptide
FPEHLLVDFLQSLS

SEQ ID NO: 1393 - protein, 9 aa, Artificial Sequence
  Description of Artificial Sequence: Synthetic peptide
DAEFRHDSG

SEQ ID NO: 1394 - protein, 16 aa, Artificial Sequence
  Description of Artificial Sequence: Synthetic peptide
HYAAAQWDFGNTMCQL

SEQ ID NO: 1395 - protein, 13 aa, Artificial Sequence
  Description of Artificial Sequence: Synthetic peptide
YAAQWDFGNTMCQ

SEQ ID NO: 1396 - protein, 10 aa, Artificial Sequence
  Description of Artificial Sequence: Synthetic peptide
RSQKEGLHYT

SEQ ID NO: 1397 - protein, 19 aa, Artificial Sequence
  Description of Artificial Sequence: Synthetic peptide
SSRTPSDKPVAHWANPQAE

SEQ ID NO: 1398 - protein, 15 aa, Artificial Sequence
  Description of Artificial Sequence: Synthetic peptide
SRTPSDKPVAHWANP

SEQ ID NO: 1399 - protein, 9 aa, Artificial Sequence
  Description of Artificial Sequence: Synthetic peptide
SSRTPSDKP

SEQ ID NO: 1400 - protein, 14 aa, Artificial Sequence
  Description of Artificial Sequence: Synthetic peptide
NADGNVDYHMNSVP

SEQ ID NO: 1401 - protein, 11 aa, Artificial Sequence
  Description of Artificial Sequence: Synthetic peptide
DGNVDYHMNSV

SEQ ID NO: 1402 - protein, 16 aa, Artificial Sequence
  Description of Artificial Sequence: Synthetic peptide
RSFKEFLQSSLRALRQ

SEQ ID NO: 1403 - protein, 11 aa, Artificial Sequence
  Description of Artificial Sequence: Synthetic peptide
FKEFLQSSLRA

SEQ ID NO: 1404 - protein, 10 aa, Artificial Sequence
  Description of Artificial Sequence: Synthetic peptide
QMWAPQWGPD

SEQ ID NO: 1405 - protein, 6 aa, Artificial Sequence
  Description of Artificial Sequence: Synthetic peptide
RGNRQA

SEQ ID NO: 1406 - protein, 6 aa, Artificial Sequence
  Description of Artificial Sequence: Synthetic peptide
SSSTDP

SEQ ID NO: 1407 - protein, 6 aa, Artificial Sequence
  Description of Artificial Sequence: Synthetic peptide
SSNTAP

SEQ ID NO: 1408 - protein, 6 aa, Artificial Sequence
  Description of Artificial Sequence: Synthetic peptide
SNSNLP

SEQ ID NO: 1409 - protein, 6 aa, Artificial Sequence
  Description of Artificial Sequence: Synthetic peptide
SSTTAP

SEQ ID NO: 1410 - protein, 6 aa, Artificial Sequence
  Description of Artificial Sequence: Synthetic peptide
AANTAA

SEQ ID NO: 1411 - protein, 6 aa, Artificial Sequence
  Description of Artificial Sequence: Synthetic peptide
QQNTAP

SEQ ID NO: 1412 - protein, 6 aa, Artificial Sequence
  Description of Artificial Sequence: Synthetic peptide
SAQAQA

SEQ ID NO: 1413 - protein, 6 aa, Artificial Sequence
  Description of Artificial Sequence: Synthetic peptide
QANTGP

SEQ ID NO: 1414 - protein, 6 aa, Artificial Sequence
  Description of Artificial Sequence: Synthetic peptide
NATTAP

SEQ ID NO: 1415 - protein, 6 aa, Artificial Sequence
  Description of Artificial Sequence: Synthetic peptide
SSTAGP

SEQ ID NO: 1416 - protein, 6 aa, Artificial Sequence
  Description of Artificial Sequence: Synthetic peptide
QQNTAA

SEQ ID NO: 1417 - protein, 6 aa, Artificial Sequence
  Description of Artificial Sequence: Synthetic peptide
PSTAGP

SEQ ID NO: 1418 - protein, 6 aa, Artificial Sequence
  Description of Artificial Sequence: Synthetic peptide
NQNTAP

SEQ ID NO: 1419 - protein, 6 aa, Artificial Sequence
  Description of Artificial Sequence: Synthetic peptide
QAANAP

SEQ ID NO: 1420 - protein, 6 aa, Artificial Sequence
  Description of Artificial Sequence: Synthetic peptide
SIVGLP

SEQ ID NO: 1421 - protein, 6 aa, Artificial Sequence
  Description of Artificial Sequence: Synthetic peptide
AASTAA

SEQ ID NO: 1422 - protein, 6 aa, Artificial Sequence
  Description of Artificial Sequence: Synthetic peptide
SQNTTA

SEQ ID NO: 1423 - protein, 6 aa, Artificial Sequence
  Description of Artificial Sequence: Synthetic peptide
QQDTAP

SEQ ID NO: 1424 - protein, 6 aa, Artificial Sequence
  Description of Artificial Sequence: Synthetic peptide
QTNTGP

SEQ ID NO: 1425 - protein, 6 aa, Artificial Sequence
  Description of Artificial Sequence: Synthetic peptide
QTNGAP

SEQ ID NO: 1426 - protein, 6 aa, Artificial Sequence
  Description of Artificial Sequence: Synthetic peptide
QQNAAP

SEQ ID NO: 1427 - protein, 6 aa, Artificial Sequence
  Description of Artificial Sequence: Synthetic peptide
AANTQA

SEQ ID NO: 1428 - protein, 6 aa, Artificial Sequence
  Description of Artificial Sequence: Synthetic peptide
NGRAHA

SEQ ID NO: 1429 - protein, 7 aa, Artificial Sequence
  Description of Artificial Sequence: Synthetic peptide
QPEHSST

SEQ ID NO: 1430 - protein, 7 aa, Artificial Sequence
  Description of Artificial Sequence: Synthetic peptide
VNTANST

SEQ ID NO: 1431 - protein, 7 aa, Artificial Sequence
  Description of Artificial Sequence: Synthetic peptide
HGPMQKS

SEQ ID NO: 1432 - protein, 7 aa, Artificial Sequence
  Description of Artificial Sequence: Synthetic peptide
PHKPPLA

SEQ ID NO: 1433 - protein, 7 aa, Artificial Sequence
  Description of Artificial Sequence: Synthetic peptide
IKNNEMW

SEQ ID NO: 1434 - protein, 7 aa, Artificial Sequence
  Description of Artificial Sequence: Synthetic peptide
RNLDTPM

SEQ ID NO: 1435 - protein, 7 aa, Artificial Sequence
  Description of Artificial Sequence: Synthetic peptide
VDSHRQS

SEQ ID NO: 1436 - protein, 7 aa, Artificial Sequence
  Description of Artificial Sequence: Synthetic peptide
YDSKTKT

SEQ ID NO: 1437 - protein, 7 aa, Artificial Sequence
  Description of Artificial Sequence: Synthetic peptide
SQLPHQK

SEQ ID NO: 1438 - protein, 7 aa, Artificial Sequence
  Description of Artificial Sequence: Synthetic peptide
STMQQNT

SEQ ID NO: 1439 - protein, 7 aa, Artificial Sequence
  Description of Artificial Sequence: Synthetic peptide
TERYMTQ

SEQ ID NO: 1440 - protein, 7 aa, Artificial Sequence
  Description of Artificial Sequence: Synthetic peptide
DASLSTS

SEQ ID NO: 1441 - protein, 7 aa, Artificial Sequence
  Description of Artificial Sequence: Synthetic peptide
DLPNKKT

SEQ ID NO: 1442 - protein, 7 aa, Artificial Sequence
  Description of Artificial Sequence: Synthetic peptide
DLTAARL

SEQ ID NO: 1443 - protein, 7 aa, Artificial Sequence
  Description of Artificial Sequence: Synthetic peptide
EPHQFNY

SEQ ID NO: 1444 - protein, 7 aa, Artificial Sequence
  Description of Artificial Sequence: Synthetic peptide
EPQSNHT

SEQ ID NO: 1445 - protein, 7 aa, Artificial Sequence
  Description of Artificial Sequence: Synthetic peptide
MSSWPSQ

SEQ ID NO: 1446 - protein, 7 aa, Artificial Sequence
  Description of Artificial Sequence: Synthetic peptide
NPKHNAT

SEQ ID NO: 1447 - protein, 7 aa, Artificial Sequence
  Description of Artificial Sequence: Synthetic peptide
PDGMRTT

SEQ ID NO: 1448 - protein, 7 aa, Artificial Sequence
  Description of Artificial Sequence: Synthetic peptide
PNNNKTT

SEQ ID NO: 1449 - protein, 7 aa, Artificial Sequence
  Description of Artificial Sequence: Synthetic peptide
QSTTHDS

SEQ ID NO: 1450 - protein, 7 aa, Artificial Sequence
  Description of Artificial Sequence: Synthetic peptide
TGSKQKQ

SEQ ID NO: 1451 - protein, 7 aa, Artificial Sequence
  Description of Artificial Sequence: Synthetic peptide
SLKHQAL

SEQ ID NO: 1452 - protein, 7 aa, Artificial Sequence
  Description of Artificial Sequence: Synthetic peptide
SPIDGEQ

SEQ ID NO: 1453 - protein, 8 aa, Artificial Sequence
  Description of Artificial Sequence: Synthetic peptide
WIFPWIQL

SEQ ID NO: 1454 - protein, 9 aa, Artificial Sequence
  Description of Artificial Sequence: Synthetic peptide
CDCRGDCFC

SEQ ID NO: 1455 - protein, 5 aa, Artificial Sequence
  Description of Artificial Sequence: Synthetic peptide
CNGRC

SEQ ID NO: 1456 - protein, 7 aa, Artificial Sequence
  Description of Artificial Sequence: Synthetic peptide
CPRECES

SEQ ID NO: 1457 - protein, 10 aa, Artificial Sequence
  Description of Artificial Sequence: Synthetic peptide
CTTHWGFTLC

SEQ ID NO: 1458 - protein, 9 aa, Artificial Sequence
  Description of Artificial Sequence: Synthetic peptide
CGRRAGGSC

SEQ ID NO: 1459 - protein, 9 aa, Artificial Sequence
  Description of Artificial Sequence: Synthetic peptide
CKGGRAKDC

SEQ ID NO: 1460 - protein, 9 aa, Artificial Sequence
  Description of Artificial Sequence: Synthetic peptide
CVPELGHEC

SEQ ID NO: 1461 - protein, 9 aa, Artificial Sequence
  Description of Artificial Sequence: Synthetic peptide
CRRETAWAK

SEQ ID NO: 1462 - protein, 14 aa, Artificial Sequence
  Description of Artificial Sequence: Synthetic peptide
VSWFSHRYSPFAVS

SEQ ID NO: 1463 - protein, 13 aa, Artificial Sequence
  Description of Artificial Sequence: Synthetic peptide
GYRDGYAGPILYN

SEQ ID NO: 1464 - protein, 7 aa, Artificial Sequence
  Description of Artificial Sequence: Synthetic peptide
  MOD_RES (1)..(3): Any amino acid
  MOD_RES (5)..(7): Any amino acid
XXXYXXX

SEQ ID NO: 1465 - protein, 4 aa, Artificial Sequence
  Description of Artificial Sequence: Synthetic peptide
  MOD_RES (2)..(2): Glu or Met
YXNW

SEQ ID NO: 1466 - protein, 7 aa, Artificial Sequence
  Description of Artificial Sequence: Synthetic peptide
RPLPPLP

SEQ ID NO: 1467 - protein, 7 aa, Artificial Sequence
  Description of Artificial Sequence: Synthetic peptide
APPLPPR

SEQ ID NO: 1468 - protein, 12 aa, Artificial Sequence
  Description of Artificial Sequence: Synthetic peptide
DVFYPYPYASGS

SEQ ID NO: 1469 - protein, 6 aa, Artificial Sequence
  Description of Artificial Sequence: Synthetic peptide
MYWYPY

SEQ ID NO: 1470 - protein, 12 aa, Artificial Sequence
  Description of Artificial Sequence: Synthetic peptide
DITWDQLWDLMK

SEQ ID NO: 1471 - protein, 8 aa, Artificial Sequence
  Description of Artificial Sequence: Synthetic peptide
  MOD_RES (5)..(5): Gly or Leu
CWDDXWLC

SEQ ID NO: 1472 - protein, 14 aa, Artificial Sequence
  Description of Artificial Sequence: Synthetic peptide
EWCEYLGGYLRCYA

SEQ ID NO: 1473 - protein, 14 aa, Artificial Sequence
  Description of Artificial Sequence: Synthetic peptide
  MOD_RES (2)..(2): Any amino acid
  MOD_RES (4)..(5): Any amino acid
  MOD_RES (8)..(8): Any amino acid
  MOD_RES (11)..(11): Any amino acid
  MOD_RES (13)..(13): Any amino acid
YXCXXGPXTWXCXP

SEQ ID NO: 1474 - protein, 14 aa, Artificial Sequence
  Description of Artificial Sequence: Synthetic peptide
IEGPTLRQWLAARA

SEQ ID NO: 1475 - protein, 5 aa, Artificial Sequence
  Description of Artificial Sequence: Synthetic peptide
  MOD_RES (3)..(4): Any amino acid
  MOD_RES (5)..(5): Tyr, Trp, Phe or His
LWXXX

SEQ ID NO: 1476 - protein, 7 aa, Artificial Sequence
  Description of Artificial Sequence: Synthetic peptide
  MOD_RES (1)..(1): Any amino acid
  MOD_RES (3)..(4): Any amino acid
XFXXYLW

SEQ ID NO: 1477 - protein, 13 aa, Artificial Sequence
  Description of Artificial Sequence: Synthetic peptide
SSIISHFRWGLCD

SEQ ID NO: 1478 - protein, 13 aa, Artificial Sequence
  Description of Artificial Sequence: Synthetic peptide
MSRPACPPNDKYE

SEQ ID NO: 1479 - protein, 8 aa, Artificial Sequence
  Description of Artificial Sequence: Synthetic peptide
CLRSGRGC

SEQ ID NO: 1480 - protein, 9 aa, Artificial Sequence
  Description of Artificial Sequence: Synthetic peptide
CHWMFSPWC

SEQ ID NO: 1481 - protein, 4 aa, Artificial Sequence
  Description of Artificial Sequence: Synthetic peptide
  MOD_RES (2)..(3): Any amino acid
WXXF

SEQ ID NO: 1482 - protein, 8 aa, Artificial Sequence
  Description of Artificial Sequence: Synthetic peptide
CSSRLDAC

SEQ ID NO: 1483 - protein, 7 aa, Artificial Sequence
  Description of Artificial Sequence: Synthetic peptide
CLPVASC

SEQ ID NO: 1484 - protein, 13 aa, Artificial Sequence
  Description of Artificial Sequence: Synthetic peptide
CGFECVRQCPERC

SEQ ID NO: 1485 - protein, 13 aa, Artificial Sequence
  Description of Artificial Sequence: Synthetic peptide
CVALCREACGEGC

SEQ ID NO: 1486 - protein, 9 aa, Artificial Sequence
  Description of Artificial Sequence: Synthetic peptide
SWCEPGWCR

SEQ ID NO: 1487 - protein, 7 aa, Artificial Sequence
  Description of Artificial Sequence: Synthetic peptide
YSGKWGW

SEQ ID NO: 1488 - protein, 7 aa, Artificial Sequence
  Description of Artificial Sequence: Synthetic peptide
GLSGGRS

SEQ ID NO: 1489 - protein, 7 aa, Artificial Sequence
  Description of Artificial Sequence: Synthetic peptide
LMLPRAD

SEQ ID NO: 1490 - protein, 9 aa, Artificial Sequence
  Description of Artificial Sequence: Synthetic peptide
CSCFRDVCC

SEQ ID NO: 1491 - protein, 9 aa, Artificial Sequence
  Description of Artificial Sequence: Synthetic peptide
CRDVVSVIC

SEQ ID NO: 1492 - protein, 6 aa, Artificial Sequence
  Description of Artificial Sequence: Synthetic peptide
MARSGL

SEQ ID NO: 1493 - protein, 6 aa, Artificial Sequence
  Description of Artificial Sequence: Synthetic peptide
MARAKE

SEQ ID NO: 1494 - protein, 6 aa, Artificial Sequence
  Description of Artificial Sequence: Synthetic peptide
MSRTMS

SEQ ID NO: 1495 - protein, 6 aa, Artificial Sequence
  Description of Artificial Sequence: Synthetic peptide
KCCYSL

SEQ ID NO: 1496 - protein, 14 aa, Artificial Sequence
  Description of Artificial Sequence: Synthetic peptide
MYWGDSHWLQYWYE

SEQ ID NO: 1497 - protein, 7 aa, Artificial Sequence
  Description of Artificial Sequence: Synthetic peptide
MQLPLAT

SEQ ID NO: 1498 - protein, 4 aa, Artificial Sequence
  Description of Artificial Sequence: Synthetic peptide
EWLS

SEQ ID NO: 1499 - protein, 4 aa, Artificial Sequence
  Description of Artificial Sequence: Synthetic peptide
SNEW

SEQ ID NO: 1500 - protein, 4 aa, Artificial Sequence
  Description of Artificial Sequence: Synthetic peptide
TNYL

SEQ ID NO: 1501 - protein, 12 aa, Artificial Sequence
  Description of Artificial Sequence: Synthetic peptide
WDLAWMFRLPVG

SEQ ID NO: 1502 - protein, 13 aa, Artificial Sequence
  Description of Artificial Sequence: Synthetic peptide
CTVALPGGYVRVC

SEQ ID NO: 1503 - protein, 13 aa, Artificial Sequence
  Description of Artificial Sequence: Synthetic peptide
CVAYCIEHHCWTC

SEQ ID NO: 1504 - protein, 12 aa, Artificial Sequence
  Description of Artificial Sequence: Synthetic peptide
CVFAHNYDYLVC

SEQ ID NO: 1505 - protein, 10 aa, Artificial Sequence
  Description of Artificial Sequence: Synthetic peptide
CVFTSNYAFC

SEQ ID NO: 1506 - protein, 7 aa, Artificial Sequence
  Description of Artificial Sequence: Synthetic peptide
VHSPNKK

SEQ ID NO: 1507 - protein, 7 aa, Artificial Sequence
  Description of Artificial Sequence: Synthetic peptide
CRGDGWC

SEQ ID NO: 1508 - protein, 6 aa, Artificial Sequence
  Description of Artificial Sequence: Synthetic peptide
  MOD_RES (1)..(1): Any amino acid
  MOD_RES (6)..(6): Any amino acid
XRGCDX

SEQ ID NO: 1509 - protein, 4 aa, Artificial Sequence
  Description of Artificial Sequence: Synthetic peptide
  MOD_RES (2)..(3): Any amino acid
  MOD_RES (4)..(4): Ser or Thr
PXXX

SEQ ID NO: 1510 - protein, 11 aa, Artificial Sequence
  Description of Artificial Sequence: Synthetic peptide
SGKGPRQITAL

SEQ ID NO: 1511 - protein, 14 aa, Artificial Sequence
  Description of Artificial Sequence: Synthetic peptide
  MOD_RES (10)..(10): Ala or Gln
  MOD_RES (11)..(11): Asn or Ala
  MOD_RES (12)..(12): Leu or Tyr
  MOD_RES (13)..(13): Thr, Val, Met or Arg
  MOD_RES (14)..(14): Arg or Lys
AAAAAAAAAANLTR

SEQ ID NO: 1512 - protein, 6 aa, Artificial Sequence
  Description of Artificial Sequence: Synthetic peptide
VYMSPF

SEQ ID NO: 1513 - protein, 7 aa, Artificial Sequence
  Description of Artificial Sequence: Synthetic peptide
ATWLPPR

SEQ ID NO: 1514 - protein, 12 aa, Artificial Sequence
  Description of Artificial Sequence: Synthetic peptide
HTMYYHHYQHHL

SEQ ID NO: 1515 - protein, 19 aa, Artificial Sequence
  Description of Artificial Sequence: Synthetic peptide
SEVGCRAGPLQWLCEKYFG

SEQ ID NO: 1516 - protein, 18 aa, Artificial Sequence
  Description of Artificial Sequence: Synthetic peptide
CGLLPVGRPDRNVWRWLC

SEQ ID NO: 1517 - protein, 15 aa, Artificial Sequence
  Description of Artificial Sequence: Synthetic peptide
CKGQCDRFKGLPWEC

SEQ ID NO: 1518 - protein, 5 aa, Artificial Sequence
  Description of Artificial Sequence: Synthetic peptide
SGRSA

SEQ ID NO: 1519 - protein, 4 aa, Artificial Sequence
  Description of Artificial Sequence: Synthetic peptide
WGFP

SEQ ID NO: 1520 - protein, 17 aa, Artificial Sequence
  Description of Artificial Sequence: Synthetic peptide
AEPMPHSLNFSQYLWYT

SEQ ID NO: 1521 - protein, 6 aa, Artificial Sequence
  Description of Artificial Sequence: Synthetic peptide
  MOD_RES (4)..(4): Trp or Phe
WAYXSP

SEQ ID NO: 1522 - protein, 7 aa, Artificial Sequence
  Description of Artificial Sequence: Synthetic peptide
IELLQAR

SEQ ID NO: 1523 - protein, 16 aa, Artificial Sequence
  Description of Artificial Sequence: Synthetic peptide
AYTKCSRQWRTCMTTH

SEQ ID NO: 1524 - protein, 15 aa, Artificial Sequence
  Description of Artificial Sequence: Synthetic peptide
PQNSKIPGPTFLDPH

SEQ ID NO: 1525 - protein, 15 aa, Artificial Sequence
  Description of Artificial Sequence: Synthetic peptide
SMEPALPDWWWKMFK

SEQ ID NO: 1526 - protein, 16 aa, Artificial Sequence
  Description of Artificial Sequence: Synthetic peptide
ANTPCGPYTHDCPVKR

SEQ ID NO: 1527 - protein, 12 aa, Artificial Sequence
  Description of Artificial Sequence: Synthetic peptide
TACHQHVRMVRP

SEQ ID NO: 1528 - protein, 12 aa, Artificial Sequence
  Description of Artificial Sequence: Synthetic peptide
VPWMEPAYQRFL

SEQ ID NO: 1529 - protein, 8 aa, Artificial Sequence
  Description of Artificial Sequence: Synthetic peptide
DPRATPGS

SEQ ID NO: 1530 - protein, 12 aa, Artificial Sequence
  Description of Artificial Sequence: Synthetic peptide
FRPNRAQDYNTN

SEQ ID NO: 1531 - protein, 9 aa, Artificial Sequence
  Description of Artificial Sequence: Synthetic peptide
CTKNSYLMC

SEQ ID NO: 1532 - protein, 11 aa, Artificial Sequence
  Description of Artificial Sequence: Synthetic peptide
  MOD_RES (2)..(2): Gln or Arg
  MOD_RES (3)..(3): Leu or Arg
  MOD_RES (5)..(5): Gly or Asn
  MOD_RES (6)..(7): Any amino acid
  MOD_RES (9)..(9): Ala or Val
CXXTXXXGXGC

SEQ ID NO: 1533 - protein, 9 aa, Artificial Sequence
  Description of Artificial Sequence: Synthetic peptide
CPIEDRPMC

SEQ ID NO: 1534 - protein, 12 aa, Artificial Sequence
  Description of Artificial Sequence: Synthetic peptide
HEWSYLAPYPWF

SEQ ID NO: 1535 - protein, 9 aa, Artificial Sequence
  Description of Artificial Sequence: Synthetic peptide
MCPKHPLGC

SEQ ID NO: 1536 - protein, 15 aa, Artificial Sequence
  Description of Artificial Sequence: Synthetic peptide
RMWPSSTVNLSAGRR

SEQ ID NO: 1537 - protein, 20 aa, Artificial Sequence
  Description of Artificial Sequence: Synthetic peptide
SAKTAVSQRVWLPSHRGGEP

SEQ ID NO: 1538 - protein, 20 aa, Artificial Sequence
  Description of Artificial Sequence: Synthetic peptide
KSREHVNNSACPSKRITAAL

SEQ ID NO: 1539 - protein, 4 aa, Artificial Sequence
  Description of Artificial Sequence: Synthetic peptide
EGFR

SEQ ID NO: 1540 - protein, 6 aa, Artificial Sequence
  Description of Artificial Sequence: Synthetic peptide
AGLGVR

SEQ ID NO: 1541 - protein, 15 aa, Artificial Sequence
  Description of Artificial Sequence: Synthetic peptide
GTRQGHTMRLGVSDG

SEQ ID NO: 1542 - protein, 15 aa, Artificial Sequence
  Description of Artificial Sequence: Synthetic peptide
IAGLATPGWSHWLAL

SEQ ID NO: 1543 - protein, 7 aa, Artificial Sequence
  Description of Artificial Sequence: Synthetic peptide
SMSIARL

SEQ ID NO: 1544 - protein, 7 aa, Artificial Sequence
  Description of Artificial Sequence: Synthetic peptide
HTFEPGV

SEQ ID NO: 1545 - protein, 15 aa, Artificial Sequence
  Description of Artificial Sequence: Synthetic peptide
NTSLKRISNKRIRRK

SEQ ID NO: 1546 - protein, 15 aa, Artificial Sequence
  Description of Artificial Sequence: Synthetic peptide
LRIKRKRRKRKKTRK

SEQ ID NO: 1547 - DNA, 21 bp, Adeno-associated virus 2
agcvvmdcaggarscascaac

SEQ ID NO: 1548 - protein, 7 aa, Artificial Sequence
  Description of Artificial Sequence: Synthetic peptide
SDSGASN

SEQ ID NO: 1549 - protein, 7 aa, Artificial Sequence
  Description of Artificial Sequence: Synthetic peptide
SPSGASN

SEQ ID NO: 1550 - protein, 7 aa, Artificial Sequence
  Description of Artificial Sequence: Synthetic peptide
SHSGASN

SEQ ID NO: 1551 - protein, 7 aa, Artificial Sequence
  Description of Artificial Sequence: Synthetic peptide
SRSGASN

SEQ ID NO: 1552 - protein, 7 aa, Artificial Sequence
  Description of Artificial Sequence: Synthetic peptide
SKSGASN

SEQ ID NO: 1553 - protein, 7 aa, Artificial Sequence
  Description of Artificial Sequence: Synthetic peptide
SNSGASN

SEQ ID NO: 1554 - protein, 7 aa, Artificial Sequence
  Description of Artificial Sequence: Synthetic peptide
SGSGASN

SEQ ID NO: 1555 - protein, 7 aa, Artificial Sequence
  Description of Artificial Sequence: Synthetic peptide
SASGASN

SEQ ID NO: 1556 - protein, 7 aa, Artificial Sequence
  Description of Artificial Sequence: Synthetic peptide
SESGTSN

SEQ ID NO: 1557 - protein, 7 aa, Artificial Sequence
  Description of Artificial Sequence: Synthetic peptide
STTGGSN

SEQ ID NO: 1558 - protein, 7 aa, Artificial Sequence
  Description of Artificial Sequence: Synthetic peptide
SSAGSTN

SEQ ID NO: 1559 - protein, 6 aa, Artificial Sequence
  Description of Artificial Sequence: Synthetic peptide
NNDSQA

SEQ ID NO: 1560 - protein, 6 aa, Artificial Sequence
  Description of Artificial Sequence: Synthetic peptide
NNRNQA

SEQ ID NO: 1561 - protein, 6 aa, Artificial Sequence
  Description of Artificial Sequence: Synthetic peptide
NNNKQA

SEQ ID NO: 1562 - protein, 6 aa, Artificial Sequence
  Description of Artificial Sequence: Synthetic peptide
NAKRQA

SEQ ID NO: 1563 - protein, 6 aa, Artificial Sequence
  Description of Artificial Sequence: Synthetic peptide
NDEHQA

SEQ ID NO: 1564 - protein, 6 aa, Artificial Sequence
  Description of Artificial Sequence: Synthetic peptide
NTSQKA

SEQ ID NO: 1565 - protein, 25 aa, Artificial Sequence
  Description of Artificial Sequence: Synthetic peptide
YYLSRTNTPSGTDTQSRLVFSQAGA

SEQ ID NO: 1566 - protein, 25 aa, Artificial Sequence
  Description of Artificial Sequence: Synthetic peptide
YYLSRTNTDSGTETQSGLDFSQAGA

SEQ ID NO: 1567 - protein, 25 aa, Artificial Sequence
  Description of Artificial Sequence: Synthetic peptide
YYLSRTNTESGTPTQSALEFSQAGA

SEQ ID NO: 1568 - protein, 25 aa, Artificial Sequence
  Description of Artificial Sequence: Synthetic peptide
YYLSRTNTHSGTHTQSPLHFSQAGA

SEQ ID NO: 1569 - protein, 25 aa, Artificial Sequence
  Description of Artificial Sequence: Synthetic peptide
YYLSRTNTSSGTITISHLIFSQAGA

SEQ ID NO: 1570 - protein, 25 aa, Artificial Sequence
  Description of Artificial Sequence: Synthetic peptide
YYLSRTNTRSGIMTKSSLMFSQAGA

SEQ ID NO: 1571 - protein, 25 aa, Artificial Sequence
  Description of Artificial Sequence: Synthetic peptide
YYLSRTNTKSGRKTLSNLSFSQAGA

SEQ ID NO: 1572 - protein, 25 aa, Artificial Sequence
  Description of Artificial Sequence: Synthetic peptide
YYLSRTNDGSGPVTPSKLRFSQRGA

SEQ ID NO: 1573 - protein, 25 aa, Artificial Sequence
  Description of Artificial Sequence: Synthetic peptide
YYLSRTNAASGHATHSDLKFSQPGA

SEQ ID NO: 1574 - protein, 25 aa, Artificial Sequence
  Description of Artificial Sequence: Synthetic peptide
YYLSRTNGQAGSLTMSELGFSQVGA

SEQ ID NO: 1575 - protein, 25 aa, Artificial Sequence
  Description of Artificial Sequence: Synthetic peptide
YYLSRTNSTGGNQTTSQLLFSQLSA

SEQ ID NO: 1576 - protein, 25 aa, Artificial Sequence
  Description of Artificial Sequence: Synthetic peptide
YFLSRTNNNTGLNTNSTLNFSQGRA

SEQ ID NO: 1577 - protein, 16 aa, Artificial Sequence
  Description of Artificial Sequence: Synthetic peptide
SKTGADNNNSEYSWTG

SEQ ID NO: 1578 - protein, 16 aa, Artificial Sequence
  Description of Artificial Sequence: Synthetic peptide
SKTDADNNNSEYSWTG

SEQ ID NO: 1579 - protein, 16 aa, Artificial Sequence
  Description of Artificial Sequence: Synthetic peptide
SKTEADNNNSEYSWTG

SEQ ID NO: 1580 - protein, 16 aa, Artificial Sequence
  Description of Artificial Sequence: Synthetic peptide
SKTPADNNNSEYSWTG

SEQ ID NO: 1581 - protein, 16 aa, Artificial Sequence
  Description of Artificial Sequence: Synthetic peptide
SKTHADNNNSEYSWTG

SEQ ID NO: 1582 - protein, 16 aa, Artificial Sequence
  Description of Artificial Sequence: Synthetic peptide
SKTQADNNNSEYSWTG

SEQ ID NO: 1583 - protein, 16 aa, Artificial Sequence
  Description of Artificial Sequence: Synthetic peptide
SKTIADNNNSEYSWTG

SEQ ID NO: 1584 - protein, 16 aa, Artificial Sequence
  Description of Artificial Sequence: Synthetic peptide
SKTMADNNNSEYSWTG

SEQ ID NO: 1585 - protein, 16 aa, Artificial Sequence
  Description of Artificial Sequence: Synthetic peptide
SKTRADNNNSEYSWTG

SEQ ID NO: 1586 - protein, 16 aa, Artificial Sequence
  Description of Artificial Sequence: Synthetic peptide
SKTNADNNNSEYSWTG

SEQ ID NO: 1587 - protein, 16 aa, Artificial Sequence
  Description of Artificial Sequence: Synthetic peptide
SKTVGRNNNSEYSWTG

SEQ ID NO: 1588 - protein, 16 aa, Artificial Sequence
  Description of Artificial Sequence: Synthetic peptide
SKTADRNNNSEYSWTG

SEQ ID NO: 1589 - protein, 16 aa, Artificial Sequence
  Description of Artificial Sequence: Synthetic peptide
SKKLSQNNNSKYSWQG

SEQ ID NO: 1590 - protein, 16 aa, Artificial Sequence
  Description of Artificial Sequence: Synthetic peptide
SKPTTGNNNSDYSWPG

SEQ ID NO: 1591 - protein, 16 aa, Artificial Sequence
  Description of Artificial Sequence: Synthetic peptide
STQKNENNNSNYSWPG

SEQ ID NO: 1592 - protein, 8 aa, Artificial Sequence
  Description of Artificial Sequence: Synthetic peptide
HKDDEGKF

SEQ ID NO: 1593 - protein, 8 aa, Artificial Sequence
  Description of Artificial Sequence: Synthetic peptide
HKDDNRKF

SEQ ID NO: 1594 - protein, 8 aa, Artificial Sequence
  Description of Artificial Sequence: Synthetic peptide
HKDDTNKF

SEQ ID NO: 1595 - protein, 8 aa, Artificial Sequence
  Description of Artificial Sequence: Synthetic peptide
HEDSDKNF

SEQ ID NO: 1596 - protein, 8 aa, Artificial Sequence
  Description of Artificial Sequence: Synthetic peptide
HRDGADSF

SEQ ID NO: 1597 - protein, 8 aa, Artificial Sequence
  Description of Artificial Sequence: Synthetic peptide
HGDNKSRF

SEQ ID NO: 1598 - protein, 14 aa, Artificial Sequence
  Description of Artificial Sequence: Synthetic peptide
KQGSEKTNVDFEEV

SEQ ID NO: 1599 - protein, 14 aa, Artificial Sequence
  Description of Artificial Sequence: Synthetic peptide
KQGSEKTNVDSEEV

SEQ ID NO: 1600 - protein, 14 aa, Artificial Sequence
  Description of Artificial Sequence: Synthetic peptide
KQGSEKTNVDVEEV

SEQ ID NO: 1601 - protein, 14 aa, Artificial Sequence
  Description of Artificial Sequence: Synthetic peptide
KQGSDKTNVDDAGV

SEQ ID NO: 1602 - protein, 14 aa, Artificial Sequence
  Description of Artificial Sequence: Synthetic peptide
KQGSSKTNVDPREV

SEQ ID NO: 1603 - protein, 14 aa, Artificial Sequence
  Description of Artificial Sequence: Synthetic peptide
KQGSRKTNVDHKQV

SEQ ID NO: 1604 - protein, 14 aa, Artificial Sequence
  Description of Artificial Sequence: Synthetic peptide
KQGSKGGNVDTNRV

SEQ ID NO: 1605 - protein, 14 aa, Artificial Sequence
  Description of Artificial Sequence: Synthetic peptide
KQGSGEANVDNGDV

SEQ ID NO: 1606 - protein, 14 aa, Artificial Sequence
  Description of Artificial Sequence: Synthetic peptide
KQDAAADNIDYDHV

SEQ ID NO: 1607 - protein, 14 aa, Artificial Sequence
  Description of Artificial Sequence: Synthetic peptide
KQSGTRSNAAASSV

SEQ ID NO: 1608 - protein, 14 aa, Artificial Sequence
  Description of Artificial Sequence: Synthetic peptide
KENTNTNDTELTNV

SEQ ID NO: 1609 - protein, 14 aa, Artificial Sequence
  Description of Artificial Sequence: Synthetic peptide
QRGNNVAATADVNT

SEQ ID NO: 1610 - protein, 14 aa, Artificial Sequence
  Description of Artificial Sequence: Synthetic peptide
QRGNNEAATADVNT

SEQ ID NO: 1611 - protein, 14 aa, Artificial Sequence
  Description of Artificial Sequence: Synthetic peptide
QRGNNPAATADVNT

SEQ ID NO: 1612 - protein, 14 aa, Artificial Sequence
  Description of Artificial Sequence: Synthetic peptide
QRGNNHAATADVNT

SEQ ID NO: 1613 - protein, 14 aa, Artificial Sequence
  Description of Artificial Sequence: Synthetic peptide
QEENNIAATPGVNT

SEQ ID NO: 1614 - protein, 14 aa, Artificial Sequence
  Description of Artificial Sequence: Synthetic peptide
QPPNNMAATHEVNT

SEQ ID NO: 1615 - protein, 14 aa, Artificial Sequence
  Description of Artificial Sequence: Synthetic peptide
QHHNNSAATTIVNT

SEQ ID NO: 1616 - protein, 14 aa, Artificial Sequence
  Description of Artificial Sequence: Synthetic peptide
QTTNNRAAFNMVET

SEQ ID NO: 1617 - protein, 14 aa, Artificial Sequence
  Description of Artificial Sequence: Synthetic peptide
QKKNNNAASKKVAT

SEQ ID NO: 1618 - protein, 14 aa, Artificial Sequence
  Description of Artificial Sequence: Synthetic peptide
QGGNNKAADDAVKT

SEQ ID NO: 1619 - protein, 14 aa, Artificial Sequence
  Description of Artificial Sequence: Synthetic peptide
QAAKGGAADDAVKT

SEQ ID NO: 1620 - protein, 14 aa, Artificial Sequence
  Description of Artificial Sequence: Synthetic peptide
QDDRAAAANESVDT

SEQ ID NO: 1621 - protein, 14 aa, Artificial Sequence
  Description of Artificial Sequence: Synthetic peptide
QQQHDDAAYQRVHT

SEQ ID NO: 1622 - protein, 14 aa, Artificial Sequence
  Description of Artificial Sequence: Synthetic peptide
QSSSSLAAVSTVQT

SEQ ID NO: 1623 - protein, 14 aa, Artificial Sequence
  Description of Artificial Sequence: Synthetic peptide
QNNQTTAAIRNVTT

SEQ ID NO: 1624 - protein, 12 aa, Artificial Sequence
  Description of Artificial Sequence: Synthetic peptide
NYNKKSDNVDFT

SEQ ID NO: 1625 - protein, 12 aa, Artificial Sequence
  Description of Artificial Sequence: Synthetic peptide
NYNKKSENVDFT

SEQ ID NO: 1626 - protein, 12 aa, Artificial Sequence
  Description of Artificial Sequence: Synthetic peptide
NYNKKSLNVDFT

SEQ ID NO: 1627 - protein, 12 aa, Artificial Sequence
  Description of Artificial Sequence: Synthetic peptide
NYNKKSPNVDFT

SEQ ID NO: 1628 - protein, 12 aa, Artificial Sequence
  Description of Artificial Sequence: Synthetic peptide
NYSKKSHCVDFT

SEQ ID NO: 1629 - protein, 11 aa, Artificial Sequence
  Description of Artificial Sequence: Synthetic peptide
NYRKTIYVDFT

SEQ ID NO: 1630 - protein, 11 aa, Artificial Sequence
  Description of Artificial Sequence: Synthetic peptide
NYKEKKDVHFT

SEQ ID NO: 1631 - protein, 11 aa, Artificial Sequence
  Description of Artificial Sequence: Synthetic peptide
NYGHRAIVQFT

SEQ ID NO: 1632 - protein, 11 aa, Artificial Sequence
  Description of Artificial Sequence: Synthetic peptide
NYANHQFVVCT

SEQ ID NO: 1633 - protein, 12 aa, Artificial Sequence
  Description of Artificial Sequence: Synthetic peptide
NYDDDPTGVLLT

SEQ ID NO: 1634 - protein, 11 aa, Artificial Sequence
  Description of Artificial Sequence: Synthetic peptide
NYDDPTGVLLT

SEQ ID NO: 1635 - protein, 11 aa, Artificial Sequence
  Description of Artificial Sequence: Synthetic peptide
NFEQQNSVEWT

SEQ ID NO: 1636 - protein, 7 aa, Artificial Sequence
  Description of Artificial Sequence: Synthetic peptide
SQSGASN

SEQ ID NO: 1637 - protein, 6 aa, Artificial Sequence
  Description of Artificial Sequence: Synthetic peptide
NNGSQA

SEQ ID NO: 1638 - protein, 25 aa, Artificial Sequence
  Description of Artificial Sequence: Synthetic peptide
YYLSRTNTPSGTTTWSRLQFSQAGA

SEQ ID NO: 1639 - protein, 16 aa, Artificial Sequence
  Description of Artificial Sequence: Synthetic peptide
SKTSADNNNSEYSWTG

SEQ ID NO: 1640 - protein, 8 aa, Artificial Sequence
  Description of Artificial Sequence: Synthetic peptide
HKDDEEKF

SEQ ID NO: 1641 - protein, 14 aa, Artificial Sequence
  Description of Artificial Sequence: Synthetic peptide
KQGSEKTNVDIEEV

SEQ ID NO: 1642 - protein, 14 aa, Artificial Sequence
  Description of Artificial Sequence: Synthetic peptide
QRGNNQAATADVNT

SEQ ID NO: 1643 - protein, 12 aa, Artificial Sequence
  Description of Artificial Sequence: Synthetic peptide
NYNKKSVNVDFT

SEQ ID NO: 1644 - protein, 42 aa, Artificial Sequence
  Description of Artificial Sequence: Synthetic polypeptide
SQSGASNYNTPSGTTTQSRLQFSTSADNNNSEYSWTGATKYH

SEQ ID NO: 1645 - protein, 42 aa, Artificial Sequence
  Description of Artificial Sequence: Synthetic polypeptide
SASGASNFNSEGGSLTQSSLGFSTDGENNNSDFSWTGATKYH

SEQ ID NO: 1646 - protein, 42 aa, Artificial Sequence
  Description of Artificial Sequence: Synthetic polypeptide
SQSGASNYNTPSGTTTQSRLQFSTDGENNNSDFSWTGATKYH

SEQ ID NO: 1647 - protein, 42 aa, Artificial Sequence
  Description of Artificial Sequence: Synthetic polypeptide
SASGASNYNTPSGTTTQSRLQFSTSADNNNSEFSWPGATTYH

SEQ ID NO: 1648 - protein, 42 aa, Artificial Sequence
  Description of Artificial Sequence: Synthetic polypeptide
SQSGASNFNSEGGSLTQSSLGFSTDGENNNSDFSWTGATKYH

SEQ ID NO: 1649 - protein, 42 aa, Artificial Sequence
  Description of Artificial Sequence: Synthetic polypeptide
SASGASNYNTPSGSLTQSSLGFSTDGENNNSDFSWTGATKYH

SEQ ID NO: 1650 - protein, 42 aa, Artificial Sequence
  Description of Artificial Sequence: Synthetic polypeptide
SQSGASNYNTPSGTTTQSRLQFSTSADNNNSDFSWTGATKYH

SEQ ID NO: 1651 - protein, 42 aa, Artificial Sequence
  Description of Artificial Sequence: Synthetic polypeptide
SGAGASNFNSEGGSLTQSSLGFSTDGENNNSDFSWTGATKYH

SEQ ID NO: 1652 - protein, 7 aa, Artificial Sequence
  Description of Artificial Sequence: Synthetic peptide
SGAGASN

SEQ ID NO: 1653 - protein, 15 aa, Artificial Sequence
  Description of Artificial Sequence: Synthetic peptide
NSEGGSLTQSSLGFS

SEQ ID NO: 1654 - protein, 11 aa, Artificial Sequence
  Description of Artificial Sequence: Synthetic peptide
TDGENNNSDFS

SEQ ID NO: 1655 - protein, 10 aa, Artificial Sequence
  Description of Artificial Sequence: Synthetic peptide
SEFSWPGATT

SEQ ID NO: 1656 - protein, 13 aa, Artificial Sequence
  Description of Artificial Sequence: Synthetic peptide
TSADNNNSDFSWT

SEQ ID NO: 1657 - protein, 8 aa, Artificial Sequence
  Description of Artificial Sequence: Synthetic peptide
SQSGASNY

SEQ ID NO: 1658 - protein, 15 aa, Artificial Sequence
  Description of Artificial Sequence: Synthetic peptide
NTPSGTTTQSRLQFS

SEQ ID NO: 1659 - protein, 19 aa, Artificial Sequence
  Description of Artificial Sequence: Synthetic peptide
TSADNNNSEYSWTGATKYH

SEQ ID NO: 1660 - protein, 8 aa, Artificial Sequence
  Description of Artificial Sequence: Synthetic peptide
SASGASNF

SEQ ID NO: 1661 - protein, 19 aa, Artificial Sequence
  Description of Artificial Sequence: Synthetic peptide
TDGENNNSDFSWTGATKYH

SEQ ID NO: 1662 - protein, 8 aa, Artificial Sequence
  Description of Artificial Sequence: Synthetic peptide
SASGASNY

SEQ ID NO: 1663 - protein, 19 aa, Artificial Sequence
  Description of Artificial Sequence: Synthetic peptide
TSADNNNSEFSWPGATTYH

SEQ ID NO: 1664 - protein, 15 aa, Artificial Sequence
  Description of Artificial Sequence: Synthetic peptide
NTPSGSLTQSSLGFS

SEQ ID NO: 1665 - protein, 19 aa, Artificial Sequence
  Description of Artificial Sequence: Synthetic peptide
TSADNNNSDFSWTGATKYH

SEQ ID NO: 1666 - protein, 8 aa, Artificial Sequence
  Description of Artificial Sequence: Synthetic peptide
SGAGASNF

SEQ ID NO: 1667 - DNA, 48 bp, Artificial Sequence
  Description of Artificial Sequence: Synthetic oligonucleotide
  modified_base (20)..(20): a, c, g, or t
  modified_base (35)..(35): a, c, g, or t
ctccagvvsvvsmrsrvcvnsgcagctdhcvvsrnsgtcvmsacacaa

SEQ ID NO: 1668 - DNA, 48 bp, Artificial Sequence
  Description of Artificial Sequence: Synthetic oligonucleotide
ctccagagaggcaacagacaagcagctaccgcagatgtcaacacacaa

SEQ ID NO: 1669 - protein, 7 aa, Artificial Sequence
  Description of Artificial Sequence: Synthetic peptide
SAAGASN

SEQ ID NO: 1670 - protein, 24 aa, Artificial Sequence
  Description of Artificial Sequence: Synthetic peptide
YFLSRTNTESGSTTQSTLRFSQAG

SEQ ID NO: 1671 - protein, 13 aa, Artificial Sequence
  Description of Artificial Sequence: Synthetic peptide
SKTSADNNNSDFS

SEQ ID NO: 1672 - protein, 14 aa, Artificial Sequence
  Description of Artificial Sequence: Synthetic peptide
KQGSEKTDVDIDKV

SEQ ID NO: 1673 - protein, 7 aa, Artificial Sequence
  Description of Artificial Sequence: Synthetic peptide
STAGASN

SEQ ID NO: 1674 - protein, 24 aa, Artificial Sequence
  Description of Artificial Sequence: Synthetic peptide
YFLSRTNTTSGIETQSTLRFSQAG

SEQ ID NO: 1675 - protein, 13 aa, Artificial Sequence
  Description of Artificial Sequence: Synthetic peptide
SKTDGENNNSDFS

SEQ ID NO: 1676 - protein, 14 aa, Artificial Sequence
  Description of Artificial Sequence: Synthetic peptide
KQGAAADDVEIDGV

SEQ ID NO: 1677 - protein, 7 aa, Artificial Sequence
  Description of Artificial Sequence: Synthetic peptide
SEAGASN

SEQ ID NO: 1678 - protein, 24 aa, Artificial Sequence
  Description of Artificial Sequence: Synthetic peptide
YYLSRTNTPSGTTTQSRLQFSQAG

SEQ ID NO: 1679 - protein, 13 aa, Artificial Sequence
  Description of Artificial Sequence: Synthetic peptide
SKTSADNNNSEYS

SEQ ID NO: 1680 - protein, 14 aa, Artificial Sequence
  Description of Artificial Sequence: Synthetic peptide
KQGSEKTNVDIEKV

SEQ ID NO: 1681 - protein, 24 aa, Artificial Sequence
  Description of Artificial Sequence: Synthetic peptide
YFLSRTNDASGSDTKSTLLFSQAG

SEQ ID NO: 1682 - protein, 13 aa, Artificial Sequence
  Description of Artificial Sequence: Synthetic peptide
STTPSENNNSEYS

SEQ ID NO: 1683 - protein, 7 aa, Artificial Sequence
  Description of Artificial Sequence: Synthetic peptide
SAAGATN

SEQ ID NO: 1684 - protein, 24 aa, Artificial Sequence
  Description of Artificial Sequence: Synthetic peptide
YFLSRTNGEAGSATLSELRFSQAG

SEQ ID NO: 1685 - protein, 8 aa, Artificial Sequence
  Description of Artificial Sequence: Synthetic peptide
HGDDADRF

SEQ ID NO: 1686 - protein, 14 aa, Artificial Sequence
  Description of Artificial Sequence: Synthetic peptide
KQGAEKSDVEVDRV

SEQ ID NO: 1687 - protein, 14 aa, Artificial Sequence
  Description of Artificial Sequence: Synthetic peptide
KQDSGGDNIDIDQV

SEQ ID NO: 1688 - protein, 7 aa, Artificial Sequence
  Description of Artificial Sequence: Synthetic peptide
SDAGASN

SEQ ID NO: 1689 - protein, 24 aa, Artificial Sequence
  Description of Artificial Sequence: Synthetic peptide
YFLSRTNTEGGHDTQSTLRFSQAG

SEQ ID NO: 1690 - protein, 14 aa, Artificial Sequence
  Description of Artificial Sequence: Synthetic peptide
KEDGGGSDVAIDEV

SEQ ID NO: 1691 - protein, 7 aa, Artificial Sequence
  Description of Artificial Sequence: Synthetic peptide
SNAGASN

SEQ ID NO: 1692 - protein, 24 aa, Artificial Sequence
  Description of Artificial Sequence: Synthetic peptide
YFLSRTNGEAGSATLSELRFSQPG

SEQ ID NO: 1693 - DNA, 21 bp, Artificial Sequence
  Description of Artificial Sequence: Synthetic oligonucleotide
agcvvmdcaggarscascaac

SEQ ID NO: 1694 - DNA, 18 bp, Artificial Sequence
  Description of Artificial Sequence: Synthetic oligonucleotide
aacracrrsmrsmaggca

SEQ ID NO: 1695 - DNA, 24 bp, Artificial Sequence
  Description of Artificial Sequence: Synthetic oligonucleotide
cacrrggacrrcrmsrrsarsttt

SEQ ID NO: 1696 - DNA, 75 bp, Artificial Sequence
  Description of Artificial Sequence: Synthetic oligonucleotide
  modified_base (35)..(35): a, c, g, or t
tatttcttgagcagaacaaacrvcvvsrscggamncvhsacgmhstcavvscttvdsttttctcagsbcrgsgcg

SEQ ID NO: 1697 - DNA, 48 bp, Artificial Sequence
  Description of Artificial Sequence: Synthetic oligonucleotide
  modified_base (11)..(11): a, c, g, or t
tcaamammavnsrvcsrsaacaacaacagtrasttctcgtggmmagga

SEQ ID NO: 1698 - DNA, 42 bp, Artificial Sequence
  Description of Artificial Sequence: Synthetic oligonucleotide
  modified_base (31)..(31): a, c, g, or t
aagsaarrcrscrvsrvarvcratrycgmsnhcrvmvrsgtc

SEQ ID NO: 1699 - DNA, 42 bp, Artificial Sequence
  Description of Artificial Sequence: Synthetic oligonucleotide
  modified_base (17)..(17): a, c, g, or t
  modified_base (32)..(32): a, c, g, or t
cagvvsvvsmrsrvcvnsgcagctdhcvvsrnsgtcvmsaca

SEQ ID NO: 1700 - DNA, 33 bp, Artificial Sequence
  Description of Artificial Sequence: Synthetic oligonucleotide
aactwcrvsvasmvsvhsddtgtgswstksact

SEQ ID NO: 1701 - DNA, 30 bp, Artificial Sequence
  Description of Artificial Sequence: Synthetic oligonucleotide
ttgttgaacatcaccacgtgacgcacgttc

SEQ ID NO: 1702 - DNA, 30 bp, Artificial Sequence
  Description of Artificial Sequence: Synthetic oligonucleotide
tccccgtggttctactacataatgtggccg

SEQ ID NO: 1703 - DNA, 30 bp, Artificial Sequence
  Description of Artificial Sequence: Synthetic oligonucleotide
ttccacactccgttttggataatgttgaac

SEQ ID NO: 1704 - DNA, 30 bp, Artificial Sequence
  Description of Artificial Sequence: Synthetic oligonucleotide
agggacatccccagctccatgctgtggtcg

SEQ ID NO: 1705 - DNA, 30 bp, Artificial Sequence
  Description of Artificial Sequence: Synthetic oligonucleotide
agggacaacccctccgactcgccctaatcc

SEQ ID NO: 1706 - DNA, 30 bp, Artificial Sequence
  Description of Artificial Sequence: Synthetic oligonucleotide
tcctagtagaagacaccctctcactgcccg

SEQ ID NO: 1707 - DNA, 30 bp, Artificial Sequence
  Description of Artificial Sequence: Synthetic oligonucleotide
agtaccatgtacacccactctcccagtgcc

SEQ ID NO: 1708 - DNA, 30 bp, Artificial Sequence
  Description of Artificial Sequence: Synthetic oligonucleotide
atatggacgttcatgctgatcaccataccg

SEQ ID NO: 1709 - DNA, 30 bp, Artificial Sequence
  Description of Artificial Sequence: Synthetic oligonucleotide
agcaggagctccttggcctcagcgtgcgag

SEQ ID NO: 1710 - DNA, 30 bp, Artificial Sequence
  Description of Artificial Sequence: Synthetic oligonucleotide
acaagcagcttcactatgacaaccactgac

SEQ ID NO: 1711 - DNA, 284 bp, Artificial Sequence
  Description of Artificial Sequence: Synthetic polynucleotide
  modified_base (59)..(59): a, c, g, or t
  modified_base (244)..(244): a, c, g, or t
cagcctaggaactggcttcctggaccctgttaccgccagcagagagtctcaamammavnsrvcsrsaacaacaacagtrasttctcctggmmaggagctaccaagtaccacctcaatggcagagactctctggtgaatcccggaccagctatggcaagccacrrggacrrcrmsrrsarsttttttcctcagagcggggttctcatctttgggaagsaarrcrscrvsrvarvcratrycgmsnhcrvmvrsgtcatgattacagacgaagaggagatctggac

SEQ ID NO: 1712 - DNA, 34 bp, Artificial Sequence
  Description of Artificial Sequence: Synthetic oligonucleotide
tgggacaatggcggtcgtctctcagagttktkkt

SEQ ID NO: 1713 - DNA, 35 bp, Artificial Sequence
  Description of Artificial Sequence: Synthetic oligonucleotide
agaggacckktcctcgatggttcatggtggagtta

SEQ ID NO: 1714 - DNA, 31 bp, Artificial Sequence
  Description of Artificial Sequence: Synthetic oligonucleotide
ccacttagggcctggtcgataccgttcggtg

SEQ ID NO: 1715 - DNA, 32 bp, Artificial Sequence
  Description of Artificial Sequence: Synthetic oligonucleotide
tctcgccccaagagtagaaacccttcsttyyg

SEQ ID NO: 1716 - protein, 735 aa, Adeno-associated virus 2 [sequence omitted]

SEQ ID NO: 1717 - protein, 736 aa, Adeno-associated virus 9; identical to SEQ ID NO: 132

SEQ ID NO: 1718 - protein, 7 aa, Artificial Sequence
  Description of Artificial Sequence: Synthetic peptide
GSTPPPM

SEQ ID NO: 1719 - protein, 7 aa, Artificial Sequence
  Description of Artificial Sequence: Synthetic peptide
GETRAPL

SEQ ID NO: 1720 - protein, 6 aa, Artificial Sequence
  Description of Artificial Sequence: Synthetic peptide
SPAKFA

SEQ ID NO: 1721 - protein, 6 aa, Artificial Sequence
  Description of Artificial Sequence: Synthetic peptide
NKDKLN

SEQ ID NO: 1722 - protein, 18 aa, Homo sapiens
MKVLWAALLVTFLAGCQA

SEQ ID NO: 1723 - protein, 44 aa, Homo sapiens
MSSGASRKSWDPGNPWPPDWPITGRKMKVLWAALLVTFLAGCQA

SEQ ID NO: 1724 - protein, 317 aa, Homo sapiens [sequence omitted]

SEQ ID NO: 1725 - protein, 299 aa, Homo sapiens
KVEQAVETEPEPELRQQTEWQSGQRWELALGRFWDYLRWVQTLSEQVQEELLSSQVTQELRALMDETMKELKAYKSELEEQLTPVAEETRARLSKELQAAQARLGADMEDVCGRLVQYRGEVQAMLGQSTEELRVRLASHLRKLRKRLLRDADDLQKRLAVYQAGAREGAERGLSAIRERLGPLVEQGRVRAATVGSLAGQPLQERAQAWGERLRARMEEMGSRTRDRLDEVKEQVAEVRAKLEEQAQQIRLQAEAFQARLKSWFEPLVEDMQRQWAGLVEKVQAAVGTSAAPVPSDNH

SEQ ID NO: 1726 - protein, 216 aa, Homo sapiens
MKVLWAALLVTFLAGCQAKVEQAVETEPEPELRQQTEWQSGQRWELALGRFWDYLRWVQTLSEQVQEELLSSQVTQELRALMDETMKELKAYKSELEEQLTPVAEETRARLSKELQAAQARLGADMEDVCGRLVQYRGEVQAMLGQSTEELRVRLASHLRKLRKRLLRDADDLQKRLAVYQAGAREGAERGLSAIRERLGPLVEQGRVRAATVGSL

SEQ ID NO: 1727 - protein, 198 aa, Homo sapiens
KVEQAVETEPEPELRQQTEWQSGQRWELALGRFWDYLRWVQTLSEQVQEELLSSQVTQELRALMDETMKELKAYKSELEEQLTPVAEETRARLSKELQAAQARLGADMEDVCGRLVQYRGEVQAMLGQSTEELRVRLASHLRKLRKRLLRDADDLQKRLAVYQAGAREGAERGLSAIRERLGPLVEQGRVRAATVGSL

SEQ ID NO: 1728 - protein, 269 aa, Homo sapiens
MSSGASRKSWDPGNPWPPDWPITGRKMKVLWAALLVTFLAGCQAKVEQAVETEPEPELRQQTEWQSGQRWELALGRFWDYLRWVQTLSEQVQEELLSSQVTQELRALMDETMKELKAYKSELEEQLTPVAEETRARLSKELQAAQARLGADMEDVCGRLVQYRGEVQAMLGQSTEELRVRLASHLRKLRKRLLRDADDLQKRLAVYQAGAREGAERGLSAIRERLGPLVEQGRVRAATVGSLAGQPLQERAQAWGERLRARMEEMGSRT

SEQ ID NO: 1729 - protein, 225 aa, Homo sapiens
KVEQAVETEPEPELRQQTEWQSGQRWELALGRFWDYLRWVQTLSEQVQEELLSSQVTQELRALMDETMKELKAYKSELEEQLTPVAEETRARLSKELQAAQARLGADMEDVCGRLVQYRGEVQAMLGQSTEELRVRLASHLRKLRKRLLRDADDLQKRLAVYQAGAREGAERGLSAIRERLGPLVEQGRVRAATVGSLAGQPLQERAQAWGERLRARMEEMGSRT

SEQ ID NO: 1730 - protein, 219 aa, Homo sapiens
MKVLWAALLVTFLAGCQAKVEQAVETEPEPELRQQTEWQSGQRWELALGRFWDYLRWVQTLSEQVQEELLSSQVTQELRALMDETMKELKAYKSELEEQLTPVAEETRARLSKELQAAQARLGADMEDVCGRLVQYRGEVQAMLGQSTEELRVRLASHLRKLRKRLLRDADDLQKRLAVYQAGAREGAERGLSAIRERLGPLVEQGRVRAATVGSLAGQ

SEQ ID NO: 1731 - protein, 201 aa, Homo sapiens
KVEQAVETEPEPELRQQTEWQSGQRWELALGRFWDYLRWVQTLSEQVQEELLSSQVTQELRALMDETMKELKAYKSELEEQLTPVAEETRARLSKELQAAQARLGADMEDVCGRLVQYRGEVQAMLGQSTEELRVRLASHLRKLRKRLLRDADDLQKRLAVYQAGAREGAERGLSAIRERLGPLVEQGRVRAATVGSLAGQ

SEQ ID NO: 1732 - protein, 343 aa, Homo sapiens
MSSGASRKSWDPGNPWPPDWPITGRKMKVLWAALLVTFLAGCQAKVEQAVETEPEPELRQQTEWQSGQRWELALGRFWDYLRWVQTLSEQVQEELLSSQVTQELRALMDETMKELKAYKSELEEQLTPVAEETRARLSKELQAAQARLGADMEDVCGRLVQYRGEVQAMLGQSTEELRVRLASHLRKLRKRLLRDADDLQKRLAVYQAGAREGAERGLSAIRERLGPLVEQGRVRAATVGSLAGQPLQERAQAWGERLRARMEEMGSRTRDRLDEVKEQVAEVRAKLEEQAQQIRLQAEAFQARLKSWFEPLVEDMQRQWAGLVEKVQAAVGTSAAPVPSDNH

SEQ ID NO: 1733 - protein, 299 aa, Homo sapiens; identical to SEQ ID NO: 1725

SEQ ID NO: 1734 - DNA, 1208 bp, Homo sapiens
agggggagccctataattggacaagtctgggatccttgagtcctactcagccccagcggaggtgaaggacgtccttccccaggagccgactggccaatcacaggcaggaagatgaaggttctgtgggctgcgttgctggtcacattcctggcaggatgccaggccaaggtggagcaagcggtggagacagagccggagcccgagctgcgccagcagaccgagtggcagagcggccagcgctgggaactggcactgggtcgcttttgggattacctgcgctgggtgcagacactgtctgagcaggtgcaggaggagctgctcagctcccaggtcacccaggaactgagggcgctgatggacgagaccatgaaggagttgaaggcctacaaatcggaactggaggaacaactgaccccggtggcggaggagacgcgggcacggctgtccaaggagctgcaggcggcgcaggcccggctgggcgcggacatggaggacgtgtgcggccgcctggtgcagtaccgcggcgaggtgcaggccatgctcggccagagcaccgaggagctgcgggtgcgcctcgcctcccacctgcgcaagctgcgtaagcggctcctccgcgatgccgatgacctgcagaagcgcctggcagtgtaccaggccggggcccgcgagggcgccgagcgcggcctcagcgccatccgcgagcgcctggggcccctggtggaacagggccgcgtgcgggccgccactgtgggctccctggccggccagccgctacaggagcgggcccaggcctggggcgagcggctgcgcgcgcggatggaggagatgggcagccggacccgcgaccgcctggacgaggtgaaggagcaggtggcggaggtgcgcgccaagctggaggagcaggcccagcagatacgcctgcaggccgaggccttccaggcccgcctcaagagctggttcgagcccctggtggaagacatgcagcgccagtgggccgggctggtggagaaggtgcaggctgccgtgggcaccagcgccgcccctgtgcccagcgacaatcactgaacgccgaagcctgcagccatgcgaccccacgccaccccgtgcctcctgcctccgcgcagcctgcagcgggagaccctgtccccgccccagccgtcctcctggggtggaccctagtttaataaagattcaccaagtttcacgca

SEQ ID NO: 1735 - DNA, 954 bp, Homo sapiens
atgaaggttctgtgggctgcgttgctggtcacattcctggcaggatgccaggccaaggtggagcaagcggtggagacagagccggagcccgagctgcgccagcagaccgagtggcagagcggccagcgctgggaactggcactgggtcgcttttgggattacctgcgctgggtgcagacactgtctgagcaggtgcaggaggagctgctcagctcccaggtcacccaggaactgagggcgctgatggacgagaccatgaaggagttgaaggcctacaaatcggaactggaggaacaactgaccccggtggcggaggagacgcgggcacggctgtccaaggagctgcaggcggcgcaggcccggctgggcgcggacatggaggacgtgtgcggccgcctggtgcagtaccgcggcgaggtgcaggccatgctcggccagagcaccgaggagctgcgggtgcgcctcgcctcccacctgcgcaagctgcgtaagcggctcctccgcgatgccgatgacctgcagaagcgcctggcagtgtaccaggccggggcccgcgagggcgccgagcgcggcctcagcgccatccgcgagcgcctggggcccctggtggaacagggccgcgtgcgggccgccactgtgggctccctggccggccagccgctacaggagcgggcccaggcctggggcgagcggctgcgcgcgcggatggaggagatgggcagccggacccgcgaccgcctggacgaggtgaaggagcaggtggcggaggtgcgcgccaagctggaggagcaggcccagcagatacgcctgcaggccgaggccttccaggcccgcctcaagagctggttcgagcccctggtggaagacatgcagcgccagtgggccgggctggtggagaaggtgcaggctgccgtgggcaccagcgccgcccctgtgcccagcgacaatcactga

SEQ ID NO: 1736 - DNA, 737 bp, Homo sapiens
gagtcctactcagccccagcggaggtgaaggacgtccttccccaggagccgtttctccttccccagactggccaatcacaggcaggaagatgaaggttctgtgggctgcgttgctggtcacattcctggcaggatgccaggccaaggtggagcaagcggtggagacagagccggagcccgagctgcgccagcagaccgagtggcagagcggccagcgctgggaactggcactgggtcgcttttgggattacctgcgctgggtgcagacactgtctgagcaggtgcaggaggagctgctcagctcccaggtcacccaggaactgagggcgctgatggacgagaccatgaaggagttgaaggcctacaaatcggaactggaggaacaactgaccccggtggcggaggagacgcgggcacggctgtccaaggagctgcaggcggcgcaggcccggctgggcgcggacatggaggacgtgtgcggccgcctggtgcagtaccgcggcgaggtgcaggccatgctcggccagagcaccgaggagctgcgggtgcgcctcgcctcccacctgcgcaagctgcgtaagcggctcctccgcgatgccgatgacctgcagaagcgcctggcagtgtaccaggccggggcccgcgagggcgccgagcgcggcctcagcgccatccgcgagcgcctggggcccctggtggaacagggccgcgtgcgggccgccactgtgggctccctg

SEQ ID NO: 1737 - DNA, 771 bp, Homo sapiens
ctactcagccccagcggaggtgaaggacgtccttccccaggagccgactggccaatcacaggcaggaagatgaaggttctgtgggctgcgttgctggtcacattcctggcaggtatgggggcggggcttgctcggttccccccgctcctccccctctcatcctcacctcaacctcctggccccattcaggcagaccctgggccccctcttctgaggcttctgtgctgcttcctggctctgaacagcgatttgacgctctctgggcctcggtttcccccatccttgagataggagttagaagttgttttgttgttgttgtttgttgttgttgttttgtttttttgagatgaagtctcgctctgtcgcccaggctggagtgcagtggcgggatctcggctcactgcaagctccgcctcccaggtccacgccattctcctgcctcagcctcccaagtagctgggactacaggcacatgccaccacacccgactaacttttttgtattttcagtagagacggggtttcaccatgttggccaggctggtctggaactcctgacctcaggtgatctgcccgtttcgatctcccaaagtgctgggattacaggcgtgagccaccgcacctggctgggagttagaggtttctaatgcattgcaggcagatagtgaataccagacacggggcagctgtgatctttattctccatcacccccacacagccctgcctggggcacacaaggacactcaatacatgcttttccgctgggcgcgg

SEQ ID NO: 1738 - DNA, 864 bp, Homo sapiens
gaggtgaaggacgtccttccccaggagccggtgagaagcgcagtcgggggcacggggatgagctcaggggcctctagaaagagctgggaccctgggaacccctggcctccagactggccaatcacaggcaggaagatgaaggttctgtgggctgcgttgctggtcacattcctggcaggatgccaggccaaggtggagcaagcggtggagacagagccggagcccgagctgcgccagcagaccgagtggcagagcggccagcgctgggaactggcactgggtcgcttttgggattacctgcgctgggtgcagacactgtctgagcaggtgcaggaggagctgctcagctcccaggtcacccaggaactgagggcgctgatggacgagaccatgaaggagttgaaggcctacaaatcggaactggaggaacaactgaccccggtggcggaggagacgcgggcacggctgtccaaggagctgcaggcggcgcaggcccggctgggcgcggacatggaggacgtgtgcggccgcctggtgcagtaccgcggcgaggtgcaggccatgctcggccagagcaccgaggagctgcgggtgcgcctcgcctcccacctgcgcaagctgcgtaagcggctcctccgcgatgccgatgacctgcagaagcgcctggcagtgtaccaggccggggcccgcgagggcgccgagcgcggcctcagcgccatccgcgagcgcctggggcccctggtggaacagggccgcgtgcgggccgccactgtgggctccctggccggccagccgctacaggagcgggcccaggcctggggcgagcggctgcgcgcgcggatggaggagatgggcagccggacc

SEQ ID NO: 1739 - DNA, 923 bp, Homo sapiens
ccgggagaggaagatggaattttctatggaggccgacctggggatggggagataagagaagaccaggagggagttaaatagggaatgggttgggggcggcttggtaaatgtgctgggattaggctgttgcagataatgcaacaaggcttggaaggctaacctggggtgaggccgggttggggccgggctgggggtgggaggagtcctcactggcggttgattgacagtttctccttccccagactggccaatcacaggcaggaagatgaaggttctgtgggctgcgttgctggtcacattcctggcaggatgccaggccaaggtggagcaagcggtggagacagagccggagcccgagctgcgccagcagaccgagtggcagagcggccagcgctgggaactggcactgggtcgcttttgggattacctgcgctgggtgcagacactgtctgagcaggtgcaggaggagctgctcagctcccaggtcacccaggaactgagggcgctgatggacgagaccatgaaggagttgaaggcctacaaatcggaactggaggaacaactgaccccggtggcggaggagacgcgggcacggctgtccaaggagctgcaggcggcgcaggcccggctgggcgcggacatggaggacgtgtgcggccgcctggtgcagtaccgcggcgaggtgcaggccatgctcggccagagcaccgaggagctgcgggtgcgcctcgcctcccacctgcgcaagctgcgtaagcggctcctccgcgatgccgatgacctgcagaagcgcctggcagtgtaccaggccggggcccgcgagggcgccgagcgcggcctcagcgccatccgcgagcgcctggggcccctggtggaacagggccgcgtgcgggccgccactgtgggctccctggccggccagc

SEQ ID NO: 1740 - DNA, 1234 bp, Homo sapiens
gggacagggggagccctataattggacaagtctgggatccttgagtcctactcagccccagcggaggtgaaggacgtccttccccaggagccgactggccaatcacaggcaggaagatgaaggttctgtgggctgcgttgctggtcacattcctggcaggatgccaggccaaggtggagcaagcggtggagacagagccggagcccgagctgcgccagcagaccgagtggcagagcggccagcgctgggaactggcactgggtcgcttttgggattacctgcgctgggtgcagacactgtctgagcaggtgcaggaggagctgctcagctcccaggtcacccaggaactgagggcgctgatggacgagaccatgaaggagttgaaggcctacaaatcggaactggaggaacaactgaccccggtggcggaggagacgcgggcacggctgtccaaggagctgcaggcggcgcaggcccggctgggcgcggacatggaggacgtgtgcggccgcctggtgcagtaccgcggcgaggtgcaggccatgctcggccagagcaccgaggagctgcgggtgcgcctcgcctcccacctgcgcaagctgcgtaagcggctcctccgcgatgccgatgacctgcagaagcgcctggcagtgtaccaggccggggcccgcgagggcgccgagcgcggcctcagcgccatccgcgagcgcctggggcccctggtggaacagggccgcgtgcgggccgccactgtgggctccctggccggccagccgctacaggagcgggcccaggcctggggcgagcggctgcgcgcgcggatggaggagatgggcagccggacccgcgaccgcctggacgaggtgaaggagcaggtggcggaggtgcgcgccaagctggaggagcaggcccagcagatacgcctgcaggccgaggccttccaggcccgcctcaagagctggttcgagcccctggtggaagacatgcagcgccagtgggccgggctggtggagaaggtgcaggctgccgtgggcaccagcgccgcccctgtgcccagcgacaatcactgaacgccgaagcctgcagccatgcgaccccacgccaccccgtgcctcctgcctccgcgcagcctgcagcgggagaccctgtccccgccccagccgtcctcctggggtggaccctagtttaataaagattcaccaagtttcacgcatcaaaaaaaaaaaaaaaaaaa

SEQ ID NO: 1741 - DNA, 1165 bp, Homo sapiens
agagacgacccgacccgctagaagactggccaatcacaggcaggaagatgaaggttctgtgggctgcgttgctggtcacattcctggcaggatgccaggccaaggtggagcaagcggtggagacagagccggagcccgagctgcgccagcagaccgagtggcagagcggccagcgctgggaactggcactgggtcgcttttgggattacctgcgctgggtgcagacactgtctgagcaggtgcaggaggagctgctcagctcccaggtcacccaggaactgagggcgctgatggacgagaccatgaaggagttgaaggcctacaaatcggaactggaggaacaactgaccccggtggcggaggagacgcgggcacggctgtccaaggagctgcaggcggcgcaggcccggctgggcgcggacatggaggacgtgtgcggccgcctggtgcagtaccgcggcgaggtgcaggccatgctcggccagagcaccgaggagctgcgggtgcgcctcgcctcccacctgcgcaagctgcgtaagcggctcctccgcgatgccgatgacctgcagaagcgcctggcagtgtaccaggccggggcccgcgagggcgccgagcgcggcctcagcgccatccgcgagcgcctggggcccctggtggaacagggccgcgtgcgggccgccactgtgggctccctggccggccagccgctacaggagcgggcccaggcctggggcgagcggctgcgcgcgcggatggaggagatgggcagccggacccgcgaccgcctggacgaggtgaaggagcaggtggcggaggtgcgcgccaagctggaggagcaggcccagcagatacgcctgcaggccgaggccttccaggcccgcctcaagagctggttcgagcccctggtggaagacatgcagcgccagtgggccgggctggtggagaaggtgcaggctgccgtgggcaccagcgccgcccctgtgcccagcgacaatcactgaacgccgaagcctgcagccatgcgaccccacgccaccccgtgcctcctgcctccgcgcagcctgcagcgggagaccctgtccccgccccagccgtcctcctggggtggaccctagtttaataaagattcaccaagtttcacgcatcaaaaaaaaaaaaaaaaaaa

SEQ ID NO: 1742 - DNA, 1265 bp, Homo sapiens
ggatggggagataagagaagaccaggagggagttaaatagggaatgggttgggggcggcttggtaaatgtgctgggattaggctgttgcagataatgcaacaaggcttggaaggctaacctgggactggccaatcacaggcaggaagatgaaggttctgtgggctgcgttgctggtcacattcctggcaggatgccaggccaaggtggagcaagcggtggagacagagccggagcccgagctgcgccagcagaccgagtggcagagcggccagcgctgggaactggcactgggtcgcttttgggattacctgcgctgggtgcagacactgtctgagcaggtgcaggaggagctgctcagctcccaggtcacccaggaactgagggcgctgatggacgagaccatgaaggagttgaaggcctacaaatcggaactggaggaacaactgaccccggtggcggaggagacgcgggcacggctgtccaaggagctgcaggcggcgcaggcccggctgggcgcggacatggaggacgtgtgcggccgcctggtgcagtaccgcggcgaggtgcaggccatgctcggccagagcaccgaggagctgcgggtgcgcctcgcctcccacctgcgcaagctgcgtaagcggctcctccgcgatgccgatgacctgcagaagcgcctggcagtgtaccaggccggggcccgcgagggcgccgagcgcggcctcagcgccatccgcgagcgcctggggcccctggtggaacagggccgcgtgcgggccgccactgtgggctccctggccggccagccgctacaggagcgggcccaggcctggggcgagcggctgcgcgcgcggatggaggagatgggcagccggacccgcgaccgcctggacgaggtgaaggagcaggtggcggaggtgcgcgccaagctggaggagcaggcccagcagatacgcctgcaggccgaggccttccaggcccgcctcaagagctggttcgagcccctggtggaagacatgcagcgccagtgggccgggctggtggagaaggtgcaggctgccgtgggcaccagcgccgcccctgtgcccagcgacaatcactgaacgccgaagcctgcagccatgcgaccccacgccaccccgtgcctcctgcctccgcgcagcctgcagcgggagaccctgtccccgccccagccgtcctcctggggtggaccctagtttaataaagattcaccaagtttcacgcatcaaaaaaaaaaaaaaaaaaa

SEQ ID NO: 1743 - DNA, 1249 bp, Homo sapiens
gggacagggggagccctataattggacaagtctgggatccttgagtcctactcagccccagcggaggtgaaggacgtccttccccaggagccgtttctccttccccagactggccaatcacaggcaggaagatgaaggttctgtgggctgcgttgctggtcacattcctggcaggatgccaggccaaggtggagcaagcggtggagacagagccggagcccgagctgcgccagcagaccgagtggcagagcggccagcgctgggaactggcactgggtcgcttttgggattacctgcgctgggtgcagacactgtctgagcaggtgcaggaggagctgctcagctcccaggtcacccaggaactgagggcgctgatggacgagaccatgaaggagttgaaggcctacaaatcggaactggaggaacaactgaccccggtggcggaggagacgcgggcacggctgtccaaggagctgcaggcggcgcaggcccggctgggcgcggacatggaggacgtgtgcggccgcctggtgcagtaccgcggcgaggtgcaggccatgctcggccagagcaccgaggagctgcgggtgcgcctcgcctcccacctgcgcaagctgcgtaagcggctcctccgcgatgccgatgacctgcagaagcgcctggcagtgtaccaggccggggcccgcgagggcgccgagcgcggcctcagcgccatccgcgagcgcctggggcccctggtggaacagggccgcgtgcgggccgccactgtgggctccctggccggccagccgctacaggagcgggcccaggcctggggcgagcggctgcgcgcgcggatggaggagatgggcagccggacccgcgaccgcctggacgaggtgaaggagcaggtggcggaggtgcgcgccaagctggaggagcaggcccagcagatacgcctgcaggccgaggccttccaggcccgcctcaagagctggttcgagcccctggtggaagacatgcagcgccagtgggccgggctggtggagaaggtgcaggctgccgtgggcaccagcgccgcccctgtgcccagcgacaatcactgaacgccgaagcctgcagccatgcgaccccacgccaccccgtgcctcctgcctccgcgcagcctgcagcgggagaccctgtccccgccccagccgtcctcctggggtggaccctagtttaataaagattcaccaagtttcacgcatcaaaaaaaaaaaaaaaaaaa

SEQ ID NO: 1744 - DNA, 1316 bp, Homo sapiens
gggacagggggagccctataattggacaagtctgggatccttgagtcctactcagccccagcggaggtgaaggacgtccttccccaggagccggtgagaagcgcagtcgggggcacggggatgagctcaggggcctctagaaagagctgggaccctgggaacccctggcctccagactggccaatcacaggcaggaagatgaaggttctgtgggctgcgttgctggtcacattcctggcaggatgccaggccaaggtggagcaagcggtggagacagagccggagcccgagctgcgccagcagaccgagtggcagagcggccagcgctgggaactggcactgggtcgcttttgggattacctgcgctgggtgcagacactgtctgagcaggtgcaggaggagctgctcagctcccaggtcacccaggaactgagggcgctgatggacgagaccatgaaggagttgaaggcctacaaatcggaactggaggaacaactgaccccggtggcggaggagacgcgggcacggctgtccaaggagctgcaggcggcgcaggcccggctgggcgcggacatggaggacgtgtgcggccgcctggtgcagtaccgcggcgaggtgcaggccatgctcggccagagcaccgaggagctgcgggtgcgcctcgcctcccacctgcgcaagctgcgtaagcggctcctccgcgatgccgatgacctgcagaagcgcctggcagtgtaccaggccggggcccgcgagggcgccgagcgcggcctcagcgccatccgcgagcgcctggggcccctggtggaacagggccgcgtgcgggccgccactgtgggctccctggccggccagccgctacaggagcgggcccaggcctggggcgagcggctgcgcgcgcggatggaggagatgggcagccggacccgcgaccgcctggacgaggtgaaggagcaggtggcggaggtgcgcgccaagctggaggagcaggcccagcagatacgcctgcaggccgaggccttccaggcccgcctcaagagctggttcgagcccctggtggaagacatgcagcgccagtgggccgggctggtggagaaggtgcaggctgccgtgggcaccagcgccgcccctgtgcccagcgacaatcactgaacgccgaagcctgcagccatgcgaccccacgccaccccgtgcctcctgcctccgcgcagcctgcagcgggagaccctgtccccgccccagccgtcctcctggggtggaccctagtttaataaagattcaccaagtttcacgcatcaaaaaaaaaaaaaaaaaaa

SEQ ID NO: 1745 - protein, 210 aa, Homo sapiens
MWTLGRRAVAGLLASPSPAQAQTLTRVPRPAELAPLCGRRGLRTDIDATCTPRRASSNQRGLNQIWNVKKQSVYLMNLRKSGTLGHPGSLDETTYERLAEETLDSLAEFFEDLADKPYTFEDYDVSFGSGVLTVKLGGDLGTYVINKQTPNKQIWLSSPSSGPKRYDWTGKNWVYSHDGVSLHELLAAELTKALKTKLDLSSLAYSGKDA

SEQ ID NO: 1746 - protein, 196 aa, Homo sapiens
MWTLGRRAVAGLLASPSPAQAQTLTRVPRPAELAPLCGRRGLRTDIDATCTPRRASSNQRGLNQIWNVKKQSVYLMNLRKSGTLGHPGSLDETTYERLAEETLDSLAEFFEDLADKPYTFEDYDVSFGSGVLTVKLGGDLGTYVINKQTPNKQIWLSSPSRYVVDLSVMTGLGKTGCTPTTACPSMSCWPQSSLKP

SEQ ID NO: 1747 - protein, 171 aa, Homo sapiens
MWTLGRRAVAGLLASPSPAQAQTLTRVPRPAELAPLCGRRGLRTDIDATCTPRRASSNQRGLNQIWNVKKQSVYLMNLRKSGTLGHPGSLDETTYERLAEETLDSLAEFFEDLADKPYTFEDYDVSFGSGVLTVKLGGDLGTYVINKQTPNKQIWLSSPSRLTWLLWLFHP

SEQ ID NO: 1748 - DNA, 7168 bp, Homo sapiens
agtctcccttgggtcaggggtcctggttgcactccgtgctttgcacaaagcaggctctccatttttgttaaatgcacgaatagtgctaagctgggaagttcttcctgaggtctaacctctagctgctcccccacagaagagtgcctgcggccagtggccaccaggggtcgccgcagcacccagcgctggagggcggagcgggcggcagacccggagcagcatgtggactctcgggcgccgcgcagtagccggcctcctggcgtcacccagcccagcccaggcccagaccctcacccgggtcccgcggccggcagagttggccccactctgcggccgccgtggcctgcgcaccgacatcgatgcgacctgcacgccccgccgcgcaagttcgaaccaacgtggcctcaaccagatttggaatgtcaaaaagcagagtgtctatttgatgaatttgaggaaatctggaactttgggccacccaggctctctagatgagaccacctatgaaagactagcagaggaaacgctggactctttagcagagttttttgaagaccttgcagacaagccatacacgtttgaggactatgatgtctcctttgggagtggtgtcttaactgtcaaactgggtggagatctaggaacctatgtgatcaacaagcagacgccaaacaagcaaatctggctatcttctccatccagtggacctaagcgttatgactggactgggaaaaactgggtgtactcccacgacggcgtgtccctccatgagctgctggccgcagagctcactaaagccttaaaaaccaaactggacttgtcttccttggcctattccggaaaagatgcttgatgcccagccccgttttaaggacattaaaagctatcaggccaagaccccagcttcattatgcagctgaggtctgttttttgttgttgttgttgtttattttttttattcctgcttttgaggacagttgggctatgtgtcacagctctgtagaaagaatgtgttgcctcctaccttgcccccaagttctgatttttaatttctatggaagattttttggattgtcggatttcctccctcacatgataccccttatcttttataatgtcttatgcctatacctgaatataacaacctttaaaaaagcaaaataataagaaggaaaaattccaggagggaaaatgaattgtcttcactcttcattctttgaaggatttactgcaagaagtacatgaagagcagctggtcaacctgctcactgttctatctccaaatgagacacattaaagggtagcctacaaatgttttcaggcttctttcaaagtgtaagcacttctgagctctttagcattgaagtgtcgaaagcaactcacacgggaagatcatttcttatttgtgctctgtgactgccaaggtgtggcctgcactgggttgtccagggagacctagtgctgtttctcccacatattcacatacgtgtctgtgtgtatatatattttttcaatttaaaggttagtatggaatcagctgctacaagaatgcaaaaaatcttccaaagacaagaaaagaggaaaaaaagccgttttcatgagctgagtgatgtagcgtaacaaacaaaatcatggagctgaggaggtgccttgtaaacatgaaggggcagataaaggaaggagatactcatgttgataaagagagccctggtcctagacatagttcagccacaaagtagttgtccctttgtggacaagtttcccaaattccctggacctctgcttccccatctgttaaatgagagaatagagtatggttgattcccagcattcagtggtcctgtcaagcaacctaacaggctagttctaattccctattgggtagatgaggggatgacaaagaacagtttttaagctatataggaaacattgttattggtgttgccctatcgtgatttcagttgaattcatgtgaaaataatagccatccttggcctggcgcggtggctcacacctgtaatcccagcacttttggaggccaaggtgggtggatcacctgaggtcaggagttcaagaccagcctggccaacatgatgaaaccccgtctctactaaaaatacaaaaaattagccgggcatgatggcaggtgcctgtaatcccagctacttgggaggctgaagcggaagaatcgcttgaacccagaggtggaggttgcagtgagccgagatcgtgccattgcactgtaacctgggtgactgagcaaaactctgtctcaaaataataataacaatataataataataatagccatcctttattgtacccttactgggttaatcgtattataccacattacctcattttaatttttactgacctgcactttatacaaagcaacaagcctccaggacattaaaattcatgcaaagttatgctcatgttatattattttcttacttaaagaaggatttattagtggctgggcatggtggcgtgcacctgtaatcccaggtactcaggaggctgagacgggagaattgcttgaccccaggcggaggaggttacagtgagtcgagatcgtacctgagcgacagagcgagactccgtctcaaaaaaaaaaaaaaggagggtttattaatgagaagtttgtattaatatgtagcaaaggcttttccaatgggtgaataaaaacacattccattaagtcaagctgggagcagtggcatatacctatagtcccagctgcacaggaggctgagacaggaggattgcttgaagccaggaattggagatcagcctgggcaacacagcaagatcctatctcttaaaaaaagaaaaaaaaacctattaataataaaacagtataaacaaaagctaaataggtaaaatattttttctgaaataaaattattttttgagtctgatggaaatgtttaagtgcagtaggccagtgccagtgagaaaataaataacatcatacatgtttgtatgtgtttgcatcttgcttctactgaaagtttcagtgcaccccacttacttagaactcggtgacatgatgtactcctttatctgggacacagcacaaaagaggtatgcagtggggctgctctgacatgaaagtggaagttaaggaatctgggctcttatggggtccttgtgggccagcccttcaggcctattttactttcattttacatatagctctaattggtttgattatctcgttcccaaggcagtgggagatccccatttaaggaaagaaaaggggcctggcacagtggctcatgcctgtaatcccagcactttgggaggctgaggcaagtgtatcacctgaggtcaggagttcaagaccagcctggccaacatggcaaaatcccgtctctactaaaaatattaaaaaattggctgggcgtggtggttcgtgcctataatttcagctactcaggaggctgaggcaggagaatcgctgtaacctggggggtggaggttgcagtgagacgagatcatgccacttcactccagcctggccaacagagccatactccgtctcaaataaataaataaataaataaagggacttcaaacacatgaacagcagccaggggaagaatcaaaatcatattctgtcaagcaaactggaaaagtaccactgtgtgtaccaatagcctccccaccacagaccctgggagcatcgcctcatttatggtgtggtccagtcatccatgtgaaggatgagtttccaggaaaaggttattaaatattcactgtaacatactggaggaggtgaggaattgcataatacaatcttagaaaacttttttttcccctttctattttttgagacaggatctcactttggcactcaggctggaggacagtggtacaatcaaagctcatggcagcctcgacctccctgggcttgggcaatcctcccacaggtgtgcacctccatagctggctaatttgtgtattttttgtagagatggggtttcaccatgttgcccaggctggtctctaacacttaggctcaagtgatccacctgcctcgtcctcccaagatgctgggattacaggtgtgtgccacaggtgttcatcagaaagctttttctattatttttaccttcttgagtgggtagaacctcagccacatagaaaataaaatgttctggcatgacttatttagctctctggaattacaaagaaggaatgaggtgtgtaaaagagaacctgggtttttgaatcacaaatttagaatttaatcgaaactctgcctcttacttgtttgtagacactgacagtggcctcatgttttttttttttttaatctataaaatggagatatctaacatgttgagcctgggcccacaggcaaagcacaatcctgatgtgagaagtactcagttcatgacaactgttgttctcacatgcatagcataatttcatattcacattggaggacttctcccaaaatatggatgacgttccctactcaaccttgaacttaatcaaaatactcagtttacttaacttcgtattagattctgattccctggaaccatttatcgtgtgccttaccatgcttatattttacttgatcttttgcataccttctaaaactattttagccaatttaaaatttgacagtttgcattaaattataggtttacaatatgctttatccagctatacctgccccaaattctgacagatgcttttgccacctctaaaggaagacccatgttcatagtgatggagtttgtgtggactaaccatgcaaggttgccaaggaaaaatcgctttacgcttccaaggtacacactaagatgaaagtaattttagtccgtgtccagttggattcttggcacatagttatcttctgctagaacaaactaaaacagctacatgccagcaagggagaaaggggaaggaggggcaaagttttgaaatttcatgtaaatttatgctgttcaaaacgacgagttcatgactttgtgtatagagtaagaaatgccttttcttttttgagacagagtcttgctctgtcacccaggctggagtgcagtggcacgatctgggctcactacaacctccgcctcctgggttcaagcaattctctgcctcagcctcccgagtagctgggattacaggtgcctgccaccacacccggctaatttttgtatttttagtagagacggggtttcaccatcatggccaggctggtcttgaactcctgacctagtaatccacctgcctccgcctcccaaagtgctgggattacaggcgtgagccactgcacccagccagaaatgccttctaatctttggtttatcttaattagccaggacacttggagtgcatcccgaagtacctgatcagtggcccctttggaatgtgtaaaactcagctcacttatatccctgcatccgctacagagacagaatccaagctcatatgttccatcttctctggctgtatagtttaaggaatggaaggcaccagaacagatttattgaaatgtttattagctgaagatttatttagacagttgaggaaaacatcagcacccagcagtaaaattggctctcaaagattttcttctcctgtggaaagtcagacctctgaggccccatccaggtagaagtactagtgcaagaagggcctctgctgtccacttgtgtttctgtgatctgtgggaacattgttaacgccacatcttgacctcaaattgtttagctcctggccagacacggtggctcacacctgtaatcccagcactttgagaggctgaggcaggtggatcacctgaggttaggagttcgaggccagcctggtcaacatggtaaaaccccgcctctactaaaaatacaaaaattagctggccgtagtggcgcacgcctgttatcccagctactcgggaggctgaggcaggagaattgcttgaacctgggtggtggaggttgcagtgagccgagattacaccactgcactccagcctgggtgacaagagggaaactccattaaaaaaatgtaattcccgtgtctgccatcttaagtgtaaaggtggctaaattatatagaaaaataagacaatatcatttcccaattacattcctttcctaccgcactctatgatgctagctgagatttttccaaaagaaaatggcttaaataaaaccctaagagaaagaaaaactttaaatccctccaaagctcaaaagtaatagaaacagatgagtttggagtcaggatttctctgtaagattgcctaggctgtgtactgcacatctccaggtgccactgttgacagagattataactacaatgtgaagtgaatggtgccactgacagttatgcaaaccgtccagagcatagccacctgatcctgctgggattcctcttgccagtccatcagcagttccccttgaaagtttcaccaaacatcccttaaatctgccctctcctgcccgtccccagtggaggtcctcatcatttttcacctgcatttttgcaggagctttcttatatccaccttcctccttttctctcagcccatcatctagctacacagtctccagggtaagctttcagaaaggcaatctcttgtctgtaaaacctaagcaggaccaaggccaagtttcttagcctgaaaaatgtgcttttctgactgaactgttcaggcactgactctacatataattatgcttttctaccccctcacactcaacactttgactccagcaatcccaaatccccagatccctaagtgtgctgtgctattttcacgtggctctcagacttggccagtgctgtttccattttggtctttattccccacatctctgcctggggggtagattctaccctgaaaaatgttcttggcacagccttgcaaactcctcctccactcagcctctgcctggatgcccttgattgttccatgtcctcagcataccatgtttgtctttcccagcactgacctaccatgtgtcacccctgcttggctgtaccttccatgaggctaggactatgtgtctcctttgttgactgctgttgccctagcatcttgcacagttccttgcacacaattagagctctataaatgtcaaataaatgtgttataattatatgtttaagatagttgttcaaataaactctaaataaccccaac

SEQ ID NO: 1749 - DNA, 7176 bp, Homo sapiens
agtctcccttgggtcaggggtcctggttgcactccgtgctttgcacaaagcaggctctccatttttgttaaatgcacgaatagtgctaagctgggaagttcttcctgaggtctaacctctagctgctcccccacagaagagtgcctgcggccagtggccaccaggggtcgccgcagcacccagcgctggagggcggagcgggcggcagacccggagcagcatgtggactctcgggcgccgcgcagtagccggcctcctggcgtcacccagcccagcccaggcccagaccctcacccgggtcccgcggccggcagagttggccccactctgcggccgccgtggcctgcgcaccgacatcgatgcgacctgcacgccccgccgcgcaagttcgaaccaacgtggcctcaaccagatttggaatgtcaaaaagcagagtgtctatttgatgaatttgaggaaatctggaactttgggccacccaggctctctagatgagaccacctatgaaagactagcagaggaaacgctggactctttagcagagttttttgaagaccttgcagacaagccatacacgtttgaggactatgatgtctcctttgggagtggtgtcttaactgtcaaactgggtggagatctaggaacctatgtgatcaacaagcagacgccaaacaagcaaatctggctatcttctccatccaggtatgtagtggacctaagcgttatgactggactgggaaaaactgggtgtactcccacgacggcgtgtccctccatgagctgctggccgcagagctcactaaagccttaaaaaccaaactggacttgtcttccttggcctattccggaaaagatgcttgatgcccagccccgttttaaggacattaaaagctatcaggccaagaccccagcttcattatgcagctgaggtctgttttttgttgttgttgttgtttattttttttattcctgcttttgaggacagttgggctatgtgtcacagctctgtagaaagaatgtgttgcctcctaccttgcccccaagttctgatttttaatttctatggaagattttttggattgtcggatttcctccctcacatgataccccttatcttttataatgtcttatgcctatacctgaatataacaacctttaaaaaagcaaaataataagaaggaaaaattccaggagggaaaatgaattgtcttcactcttcattctttgaaggatttactgcaagaagtacatgaagagcagctggtcaacctgctcactgttctatctccaaatgagacacattaaagggtagcctacaaatgttttcaggcttctttcaaagtgtaagcacttctgagctctttagcattgaagtgtcgaaagcaactcacacgggaagatcatttcttatttgtgctctgtgactgccaaggtgtggcctgcactgggttgtccagggagacctagtgctgtttctcccacatattcacatacgtgtctgtgtgtatatatattttttcaatttaaaggttagtatggaatcagctgctacaagaatgcaaaaaatcttccaaagacaagaaaagaggaaaaaaagccgttttcatgagctgagtgatgtagcgtaacaaacaaaatcatggagctgaggaggtgccttgtaaacatgaaggggcagataaaggaaggagatactcatgttgataaagagagccctggtcctagacatagttcagccacaaagtagttgtccctttgtggacaagtttcccaaattccctggacctctgcttccccatctgttaaatgagagaatagagtatggttgattcccagcattcagtggtcctgtcaagcaacctaacaggctagttctaattccctattgggtagatgaggggatgacaaagaacagtttttaagctatataggaaacattgttattggtgttgccctatcgtgatttcagttgaattcatgtgaaaataatagccatccttggcctggcgcggtggctcacacctgtaatcccagcacttttggaggccaaggtgggtggatcacctgaggtcaggagttcaagaccagcctggccaacatgatgaaaccccgtctctactaaaaatacaaaaaattagccgggcatgatggcaggtgcctgtaatcccagctacttgggaggctgaagcggaagaatcgcttgaacccagaggtggaggttgcagtgagccgagatcgtgccattgcactgtaacctgggtgactgagcaaaactctgtctcaaaataataataacaatataataataataatagccatcctttattgtacccttactgggttaatcgtattataccacattacctcattttaatttttactgacctgcactttatacaaagcaacaagcctccaggacattaaaattcatgcaaagttatgctcatgttatattattttcttacttaaagaaggatttattagtggctgggcatggtggcgtgcacctgtaatcccaggtactcaggaggctgagacgggagaattgcttgaccccaggcggaggaggttacagtgagtcgagatcgtacctgagcgacagagcgagactccgtctcaaaaaaaaaaaaaaggagggtttattaatgagaagtttgtattaatatgtagcaaaggcttttccaatgggtgaataaaaacacattccattaagtcaagctgggagcagtggcatatacctatagtcccagctgcacaggaggctgagacaggaggattgcttgaagccaggaattggagatcagcctgggcaacacagcaagatcctatctcttaaaaaaagaaaaaaaaacctattaataataaaacagtataaacaaaagctaaataggtaaaatattttttctgaaataaaattattttttgagtctgatggaaatgtttaagtgcagtaggccagtgccagtgagaaaataaataacatcatacatgtttgtatgtgtttgcatcttgcttctactgaaagtttcagtgcaccccacttacttagaactcggtgacatgatgtactcctttatctgggacacagcacaaaagaggtatgcagtggggctgctctgacatgaaagtggaagttaaggaatctgggctcttatggggtccttgtgggccagcccttcaggcctattttactttcattttacatatagctctaattggtttgattatctcgttcccaaggcagtgggagatccccatttaaggaaagaaaaggggcctggcacagtggctcatgcctgtaatcccagcactttgggaggctgaggcaagtgtatcacctgaggtcaggagttcaagaccagcctggccaacatggcaaaatcccgtctctactaaaaatattaaaaaattggctgggcgtggtggttcgtgcctataatttcagctactcaggaggctgaggcaggagaatcgctgtaacctggggggtggaggttgcagtgagacgagatcatgccacttcactccagcctggccaacagagccatactccgtctcaaataaataaataaataaataaagggacttcaaacacatgaacagcagccaggggaagaatcaaaatcatattctgtcaagcaaactggaaaagtaccactgtgtgtaccaatagcctccccaccacagaccctgggagcatcgcctcatttatggtgtggtccagtcatccatgtgaaggatgagtttccaggaaaaggttattaaatattcactgtaacatactggaggaggtgaggaattgcataatacaatcttagaaaacttttttttcccctttctattttttgagacaggatctcactttggcactcaggctggaggacagtggtacaatcaaagctcatggcagcctcgacctccctgggcttgggcaatcctcccacaggtgtgcacctccatagctggctaatttgtgtattttttgtagagatggggtttcaccatgttgcccaggctggtctctaacacttaggctcaagtgatccacctgcctcgtcctcccaagatgctgggattacaggtgtgtgccacaggtgttcatcagaaagctttttctattatttttaccttcttgagtgggtagaacctcagccacatagaaaataaaatgttctggcatgacttatttagctctctggaattacaaagaaggaatgaggtgtgtaaaagagaacctgggtttttgaatcacaaatttagaatttaatcgaaactctgcctcttacttgtttgtagacactgacagtggcctcatgttttttttttttttaatctataaaatggagatatctaacatgttgagcctgggcccacaggcaaagcacaatcctgatgtgagaagtactcagttcatgacaactgttgttctcacatgcatagcataatttcatattcacattggaggacttctcccaaaatatggatgacgttccctactcaaccttgaacttaatcaaaatactcagtttacttaacttcgtattagattctgattccctggaaccatttatcgtgtgccttaccatgcttatattttacttgatcttttgcataccttctaaaactattttagccaatttaaaatttgacagtttgcattaaattataggtttacaatatgctttatccagctatacctgccccaaattctgacagatgcttttgccacctctaaaggaagacccatgttcatagtgatggagtttgtgtggactaaccatgcaaggttgccaaggaaaaatcgctttacgcttccaaggtacacactaagatgaaagtaattttagtccgtgtccagttggattcttggcacatagttatcttctgctagaacaaactaaaacagctacatgccagcaagggagaaaggggaaggaggggcaaagttttgaaatttcatgtaaatttatgctgttcaaaacgacgagttcatgactttgtgtatagagtaagaaatgccttttcttttttgagacagagtcttgctctgtcacccaggctggagtgcagtggcacgatctgggctcactacaacctccgcctcctgggttcaagcaattctctgcctcagcctcccgagtagctgggattacaggtgcctgccaccacacccggctaatttttgtatttttagtagagacggggtttcaccatcatggccaggctggtcttgaactcctgacctagtaatccacctgcctccgcctcccaaagtgctgggattacaggcgtgagccactgcacccagccagaaatgccttctaatctttggtttatcttaattagccaggacacttggagtgcatcccgaagtacctgatcagtggcccctttggaatgtgtaaaactcagctcacttatatccctgcatccgctacagagacagaatccaagctcatatgttccatcttctctggctgtatagtttaaggaatggaaggcaccagaacagatttattgaaatgtttattagctgaagatttatttagacagttgaggaaaacatcagcacccagcagtaaaattggctctcaaagattttcttctcctgtggaaagtcagacctctgaggccccatccaggtagaagtactagtgcaagaagggcctctgctgtccacttgtgtttctgtgatctgtgggaacattgttaacgccacatcttgacctcaaattgtttagctcctggccagacacggtggctcacacctgtaatcccagcactttgagaggctgaggcaggtggatcacctgaggttaggagttcgaggccagcctggtcaacatggtaaaaccccgcctctactaaaaatacaaaaattagctggccgtagtggcgcacgcctgttatcccagctactcgggaggctgaggcaggagaattgcttgaacctgggtggtggaggttgcagtgagccgagattacaccactgcactccagcctgggtgacaagagggaaactccattaaaaaaatgtaattcccgtgtctgccatcttaagtgtaaaggtggctaaattatatagaaaaataagacaatatcatttcccaattacattcctttcctaccgcactctatgatgctagctgagatttttccaaaagaaaatggcttaaataaaaccctaagagaaagaaaaactttaaatccctccaaagctcaaaagtaatagaaacagatgagtttggagtcaggatttctctgtaagattgcctaggctgtgtactgcacatctccaggtgccactgttgacagagattataactacaatgtgaagtgaatggtgccactgacagttatgcaaaccgtccagagcatagccacctgatcctgctgggattcctcttgccagtccatcagcagttccccttgaaagtttcaccaaacatcccttaaatctgccctctcctgcccgtccccagtggaggtcctcatcatttttcacctgcatttttgcaggagctttcttatatccaccttcctccttttctctcagcccatcatctagctacacagtctccagggtaagctttcagaaaggcaatctcttgtctgtaaaacctaagcaggaccaaggccaagtttcttagcctgaaaaatgtgcttttctgactgaactgttcaggcactgactctacatataattatgcttttctaccccctcacactcaacactttgactccagcaatcccaaatccccagatccctaagtgtgctgtgctattttcacgtggctctcagacttggccagtgctgtttccattttggtctttattccccacatctctgcctggggggtagattctaccctgaaaaatgttcttggcacagccttgcaaactcctcctccactcagcctctgcctggatgcccttgattgttccatgtcctcagcataccatgtttgtctttcccagcactgacctaccatgtgtcacccctgcttggctgtaccttccatgaggctaggactatgtgtctcctttgttgactgctgttgccctagcatcttgcacagttccttgcacacaattagagctctataaatgtcaaataaatgtgttataattatatgtttaagatagttgttcaaataaactctaaataaccccaac

SEQ ID NO: 1750 - DNA, 980 bp, Homo sapiens
agtctcccttgggtcaggggtcctggttgcactccgtgctttgcacaaagcaggctctccatttttgttaaatgcacgaatagtgctaagctgggaagttcttcctgaggtctaacctctagctgctcccccacagaagagtgcctgcggccagtggccaccaggggtcgccgcagcacccagcgctggagggcggagcgggcggcagacccggagcagcatgtggactctcgggcgccgcgcagtagccggcctcctggcgtcacccagcccagcccaggcccagaccctcacccgggtcccgcggccggcagagttggccccactctgcggccgccgtggcctgcgcaccgacatcgatgcgacctgcacgccccgccgcgcaagttcgaaccaacgtggcctcaaccagatttggaatgtcaaaaagcagagtgtctatttgatgaatttgaggaaatctggaactttgggccacccaggctctctagatgagaccacctatgaaagactagcagaggaaacgctggactctttagcagagttttttgaagaccttgcagacaagccatacacgtttgaggactatgatgtctcctttgggagtggtgtcttaactgtcaaactgggtggagatctaggaacctatgtgatcaacaagcagacgccaaacaagcaaatctggctatcttctccatccaggttaacgtggctcctgtggctgttccatccctgaggaaaagtgaggaccatgctctccaaacaggccatgtgctggactacctctgtttctgtctcctgggattccaatcagcaagtgagcaacgaagcaacccagacagtgtggttcataggatggctgggtaagtggctgtttgttttttccttactgtggatatgtatcagtgaaggaatctgtagaacattcttgatgggaacatttagtcatatcaagtcaataaattaatgtttaggctggg

SEQ ID NO: 1751 - protein, 480 aa, Homo sapiens
MNASEFRRRGKEMVDYVANYMEGIEGRQVYPDVEPGYLRPLIPAAAPQEPDTFEDIINDVEKIIMPGVTHWHSPYFFAYFPTASSYPAMLADMLCGAIGCIGFSWAASPACTELETVMMDWLGKMLELPKAFLNEKAGEGGGVIQGSASEATLVALLAARTKVIHRLQAASPELTQAAIMEKLVAYSSDQAHSSVERAGLIGGVKLKAIPSDGNFAMRASALQEALERDKAAGLIPFFMVATLGTTTCCSFDNLLEVGPICNKEDIWLHVDAAYAGSAFICPEFRHLLNGVEFADSFNFNPHKWLLVNFDCSAMWVKKRTDLTGAFRLDPTYLKHSHQDSGLITDYRHWQIPLGRRFRSLKMWFVFRMYGVKGLQAYIRKHVQLSHEFESLVRQDPRFEICVEVILGLVCFRLKGSNKVNEALLQRINSAKKIHLVPCHLRDKFVLRFAICSRTVESAHVQRAWEHIKELAADVLRAERE

SEQ ID NO: 1752 - DNA, 1975 bp, Homo sapiens
aactgtcactgtggagaggagagagagaggacagagagcaagtcactcccggctgcctttttcacctctgacagagcccagacaccatgaacgcaagtgaattccgaaggagagggaaggagatggtggattacgtggccaactacatggaaggcattgagggacgccaggtctaccctgacgtggagcccgggtacctgcggccgctgatccctgccgctgcccctcaggagccagacacgtttgaggacatcatcaacgacgttgagaagataatcatgcctggggtgacgcactggcacagcccctacttcttcgcctacttccccactgccagctcgtacccggccatgcttgcggacatgctgtgcggggccattggctgcatcggcttctcctgggcggcaagcccagcatgcacagagctggagactgtgatgatggactggctcgggaagatgctggaactaccaaaggcatttttgaatgagaaagctggagaagggggaggagtgatccagggaagtgccagtgaagccaccctggtggccctgctggccgctcggaccaaagtgatccatcggctgcaggcagcgtccccagagctcacacaggccgctatcatggagaagctggtggcttactcatccgatcaggcacactcctcagtggaaagagctgggttaattggtggagtgaaattaaaagccatcccctcagatggcaacttcgccatgcgtgcgtctgccctgcaggaagccctggagagagacaaagcggctggcctgattcctttctttatggttgccaccctggggaccacaacatgctgctcctttgacaatctcttagaagtcggtcctatctgcaacaaggaagacatatggctgcacgttgatgcagcctacgcaggcagtgcattcatctgccctgagttccggcaccttctgaatggagtggagtttgcagattcattcaactttaatccccacaaatggctattggtgaattttgactgttctgccatgtgggtgaaaaagagaacagacttaacgggagcctttagactggaccccacttacctgaagcacagccatcaggattcagggcttatcactgactaccggcattggcagataccactgggcagaagatttcgctctttgaaaatgtggtttgtatttaggatgtatggagtcaaaggactgcaggcttatatccgcaagcatgtccagctgtcccatgagtttgagtcactggtgcgccaggatccccgctttgaaatctgtgtggaagtcattctggggcttgtctgctttcggctaaagggttccaacaaagtgaatgaagctcttctgcaaagaataaacagtgccaaaaaaatccacttggttccatgtcacctcagggacaagtttgtcctgcgctttgccatctgttctcgcacggtggaatctgcccatgtgcagcgggcctgggaacacatcaaagagctggcggccgacgtgctgcgagcagagagggagtaggagtgaagccagctgcaggaatcaaaaattgaagagagatatatctgaaaactggaataagaagcaaataaatatcatcctgccttcatggaactcagctgtctgtggcttcccatgtctttctccaaagttatccagagggttgtgattttgtctgcttagtatctcatcaacaaagaaatattatttgctaattaaaaagttaatcttcatggccatagcttttattcattagctgtgatttttgttgattaaaacattatagattttcatgttcttgcagtcatcagaagtggtaggaaagcctcactgatatattttccagggcaatcaatgttcacgcaacttgaaattatatctgtggtcttcaaattgtcttttgtcatgtggctaaatgcctaataaacaattcaagtgaaatactaaaaaaaaaaaaaaaaaaaaaa

SEQ ID NO: 1753 - DNA, 981 bp, Homo sapiens
gtttggggccagagtgggcgaggcgcggaggtctggcctataaagtagtcgcggagacggggtgctggtttgcgtcgtagtctcctgcagcgtctggggtttccgttgcagtcctcggaaccaggacctcggcgtggcctagcgagttatggcgacgaaggccgtgtgcgtgctgaagggcgacggcccagtgcagggcatcatcaatttcgagcagaaggaaagtaatggaccagtgaaggtgtggggaagcattaaaggactgactgaaggcctgcatggattccatgttcatgagtttggagataatacagcaggctgtaccagtgcaggtcctcactttaatcctctatccagaaaacacggtgggccaaaggatgaagagaggcatgttggagacttgggcaatgtgactgctgacaaagatggtgtggccgatgtgtctattgaagattctgtgatctcactctcaggagaccattgcatcattggccgcacactggtggtccatgaaaaagcagatgacttgggcaaaggtggaaatgaagaaagtacaaagacaggaaacgctggaagtcgtttggcttgtggtgtaattgggatcgcccaataaacattcccttggatgtagtctgaggccccttaactcatctgttatcctgctagctgtagaaatgtatcctgataaacattaaacactgtaatcttaaaagtgtaattgtgtgactttttcagagttgctttaaagtacctgtagtgagaaactgatttatgatcacttggaagatttgtatagttttataaaactcagttaaaatgtctgtttcaatgacctgtattttgccagacttaaatcacagatgggtattaaacttgtcagaatttctttgtcattcaagcctgtgaataaaaaccctgtatggcacttattatgaggctattaaaagaatccaaattcaaactaaaaaaaaaaaaaaaaaa

SEQ ID NO: 1754 - DNA, 13669 bp, Homo sapiens
ttgctgtgtgaggcagaacctgcgggggcaggggcgggctggttccctggccagccattggcagagtccgcaggctagggctgtcaatcatgctggccggcgtggccccgcctccgccggcgcggccccgcctccgccggcgcagcgtctgggacgcaaggcgccgtgggggctgccgggacgggtccaagatggacggccgctcaggttctgcttttacctgcggcccagagccccattcattgccccggtgctgagcggcgccgcgagtcggcccgaggcctccggggactgccgtgccgggcgggagaccgccatggcgaccctggaaaagctgatgaaggccttcgagtccctcaagtccttccagcagcagcagcagcagcagcagcagcagcagcagcagcagcagcagcagcagcagcagcagcaacagccgccaccgccgccgccgccgccgccgcctcctcagcttcctcagccgccgccgcaggcacagccgctgctgcctcagccgcagccgcccccgccgccgcccccgccgccacccggcccggctgtggctgaggagccgctgcaccgaccaaagaaagaactttcagctaccaagaaagaccgtgtgaatcattgtctgacaatatgtgaaaacatagtggcacagtctgtcagaaattctccagaatttcagaaacttctgggcatcgctatggaactttttctgctgtgcagtgatgacgcagagtcagatgtcaggatggtggctgacgaatgcctcaacaaagttatcaaagctttgatggattctaatcttccaaggttacagctcgagctctataaggaaattaaaaagaatggtgcccctcggagtttgcgtgctgccctgtggaggtttgctgagctggctcacctggttcggcctcagaaatgcaggccttacctggtgaaccttctgccgtgcctgactcgaacaagcaagagacccgaagaatcagtccaggagaccttggctgcagctgttcccaaaattatggcttcttttggcaattttgcaaatgacaatgaaattaaggttttgttaaaggccttcatagcgaacctgaagtcaagctcccccaccattcggcggacagcggctggatcagcagtgagcatctgccagcactcaagaaggacacaatatttctatagttggctactaaatgtgctcttaggcttactcgttcctgtcgaggatgaacactccactctgctgattcttggcgtgctgctcaccctgaggtatttggtgcccttgctgcagcagcaggtcaaggacacaagcctgaaaggcagcttcggagtgacaaggaaagaaatggaagtctctccttctgcagagcagcttgtccaggtttatgaactgacgttacatcatacacagcaccaagaccacaatgttgtgaccggagccctggagctgttgcagcagctcttcagaacgcctccacccgagcttctgcaaaccctgaccgcagtcgggggcattgggcagctcaccgctgctaaggaggagtctggtggccgaagccgtagtgggagtattgtggaacttatagctggagggggttcctcatgcagccctgtcctttcaagaaaacaaaaaggcaaagtgctcttaggagaagaagaagccttggaggatgactctgaatcgagatcggatgtcagcagctctgccttaacagcctcagtgaaggatgagatcagtggagagctggctgcttcttcaggggtttccactccagggtcagcaggtcatgacatcatcacagaacagccacggtcacagcacacactgcaggcggactcagtggatctggccagctgtgacttgacaagctctgccactgatggggatgaggaggatatcttgagccacagctccagccaggtcagcgccgtcccatctgaccctgccatggacctgaatgatgggacccaggcctcgtcgcccatcagcgacagctcccagaccaccaccgaagggcctgattcagctgttaccccttcagacagttctgaaattgtgttagacggtaccgacaaccagtatttgggcctgcagattggacagccccaggatgaagatgaggaagccacaggtattcttcctgatgaagcctcggaggccttcaggaactcttccatggcccttcaacaggcacatttattgaaaaacatgagtcactgcaggcagccttctgacagcagtgttgataaatttgtgttgagagatgaagctactgaaccgggtgatcaagaaaacaagccttgccgcatcaaaggtgacattggacagtccactgatgatgactctgcacctcttgtccattgtgtccgccttttatctgcttcgtttttgctaacagggggaaaaaatgtgctggttccggacagggatgtgagggtcagcgtgaaggccctggccctcagctgtgtgggagcagctgtggccctccacccggaatctttcttcagcaaactctataaagttcctcttgacaccacggaataccctgaggaacagtatgtctcagacatcttgaactacatcgatcatggagacccacaggttcgaggagccactgccattctctgtgggaccctcatctgctccatcctcagcaggtcccgcttccacgtgggagattggatgggcaccattagaaccctcacaggaaatacattttctttggcggattgcattcctttgctgcggaaaacactgaaggatgagtcttctgttacttgcaagttagcttgtacagctgtgaggaactgtgtcatgagtctctgcagcagcagctacagtgagttaggactgcagctgatcatcgatgtgctgactctgaggaacagttcctattggctggtgaggacagagcttctggaaacccttgcagagattgacttcaggctggtgagctttttggaggcaaaagcagaaaacttacacagaggggctcatcattatacagggcttttaaaactgcaagaacgagtgctcaataatgttgtcatccatttgcttggagatgaagaccccagggtgcgacatgttgccgcagcatcactaattaggcttgtcccaaagctgttttataaatgtgaccaaggacaagctgatccagtagtggccgtggcaagagatcaaagcagtgtttacctgaaacttctcatgcatgagacgcagcctccatctcatttctccgtcagcacaataaccagaatatatagaggctataacctactaccaagcataacagacgtcactatggaaaataacctttcaagagttattgcagcagtttctcatgaactaatcacatcaaccaccagagcactcacatttggatgctgtgaagctttgtgtcttctttccactgccttcccagtttgcatttggagtttaggttggcactgtggagtgcctccactgagtgcctcagatgagtctaggaagagctgtaccgttgggatggccacaatgattctgaccctgctctcgtcagcttggttcccattggatctctcagcccatcaagatgctttgattttggccggaaacttgcttgcagccagtgctcccaaatctctgagaagttcatgggcctctgaagaagaagccaacccagcagccaccaagcaagaggaggtctggccagccctgggggaccgggccctggtgcccatggtggagcagctcttctctcacctgctgaaggtgattaacatttgtgcccacgtcctggatgacgtggctcctggacccgcaataaaggcagccttgccttctctaacaaaccccccttctctaagtcccatccgacgaaaggggaaggagaaagaaccaggagaacaagcatctgtaccgttgagtcccaagaaaggcagtgaggccagtgcagcttctagacaatctgatacctcaggtcctgttacaacaagtaaatcctcatcactggggagtttctatcatcttccttcatacctcaaactgcatgatgtcctgaaagctacacacgctaactacaaggtcacgctggatcttcagaacagcacggaaaagtttggagggtttctccgctcagccttggatgttctttctcagatactagagctggccacactgcaggacattgggaagtgtgttgaagagatcctaggatacctgaaatcctgctttagtcgagaaccaatgatggcaactgtttgtgttcaacaattgttgaagactctctttggcacaaacttggcctcccagtttgatggcttatcttccaaccccagcaagtcacaaggccgagcacagcgccttggctcctccagtgtgaggccaggcttgtaccactactgcttcatggccccgtacacccacttcacccaggccctcgctgacgccagcctgaggaacatggtgcaggcggagcaggagaacgacacctcgggatggtttgatgtcctccagaaagtgtctacccagttgaagacaaacctcacgagtgtcacaaagaaccgtgcagataagaatgctattcataatcacattcgtttgtttgaacctcttgttataaaagctttaaaacagtacacgactacaacatgtgtgcagttacagaagcaggttttagatttgctggcgcagctggttcagttacgggttaattactgtcttctggattcagatcaggtgtttattggctttgtattgaaacagtttgaatacattgaagtgggccagttcagggaatcagaggcaatcattccaaacatctttttcttcttggtattactatcttatgaacgctatcattcaaaacagatcattggaattcctaaaatcattcagctctgtgatggcatcatggccagtggaaggaaggctgtgacacatgccataccggctctgcagcccatagtccacgacctctttgtattaagaggaacaaataaagctgatgcaggaaaagagcttgaaacccaaaaagaggtggtggtgtcaatgttactgagactcatccagtaccatcaggtgttggagatgttcattcttgtcctgcagcagtgccacaaggagaatgaagacaagtggaagcgactgtctcgacagatagctgacatcatcctcccaatgttagccaaacagcagatgcacattgactctcatgaagcccttggagtgttaaatacattatttgagattttggccccttcctccctccgtccggtagacatgcttttacggagtatgttcgtcactccaaacacaatggcgtccgtgagcactgttcaactgtggatatcgggaattctggccattttgagggttctgatttcccagtcaactgaagatattgttctttctcgtattcaggagctctccttctctccgtatttaatctcctgtacagtaattaataggttaagagatggggacagtacttcaacgctagaagaacacagtgaagggaaacaaataaagaatttgccagaagaaacattttcaaggtttctattacaactggttggtattcttttagaagacattgttacaaaacagctgaaggtggaaatgagtgagcagcaacatactttctattgccaggaactaggcacactgctaatgtgtctgatccacatcttcaagtctggaatgttccggagaatcacagcagctgccactaggctgttccgcagtgatggctgtggcggcagtttctacaccctggacagcttgaacttgcgggctcgttccatgatcaccacccacccggccctggtgctgctctggtgtcagatactgctgcttgtcaaccacaccgactaccgctggtgggcagaagtgcagcagaccccgaaaagacacagtctgtccagcacaaagttacttagtccccagatgtctggagaagaggaggattctgacttggcagccaaacttggaatgtgcaatagagaaatagtacgaagaggggctctcattctcttctgtgattatgtctgtcagaacctccatgactccgagcacttaacgtggctcattgtaaatcacattcaagatctgatcagcctttcccacgagcctccagtacaggacttcatcagtgccgttcatcggaactctgctgccagcggcctgttcatccaggcaattcagtctcgttgtgaaaacctttcaactccaaccatgctgaagaaaactcttcagtgcttggaggggatccatctcagccagtcgggagctgtgctcacgctgtatgtggacaggcttctgtgcacccctttccgtgtgctggctcgcatggtcgacatccttgcttgtcgccgggtagaaatgcttctggctgcaaatttacagagcagcatggcccagttgccaatggaagaactcaacagaatccaggaataccttcagagcagcgggctcgctcagagacaccaaaggctctattccctgctggacaggtttcgtctctccaccatgcaagactcacttagtccctctcctccagtctcttcccacccgctggacggggatgggcacgtgtcactggaaacagtgagtccggacaaagactggtacgttcatcttgtcaaatcccagtgttggaccaggtcagattctgcactgctggaaggtgcagagctggtgaatcggattcctgctgaagatatgaatgccttcatgatgaactcggagttcaacctaagcctgctagctccatgcttaagcctagggatgagtgaaatttctggtggccagaagagtgccctttttgaagcagcccgtgaggtgactctggcccgtgtgagcggcaccgtgcagcagctccctgctgtccatcatgtcttccagcccgagctgcctgcagagccggcggcctactggagcaagttgaatgatctgtttggggatgctgcactgtatcagtccctgcccactctggcccgggccctggcacagtacctggtggtggtctccaaactgcccagtcatttgcaccttcctcctgagaaagagaaggacattgtgaaattcgtggtggcaacccttgaggccctgtcctggcatttgatccatgagcagatcccgctgagtctggatctccaggcagggctggactgctgctgcctggccctgcagctgcctggcctctggagcgtggtctcctccacagagtttgtgacccacgcctgctccctcatctactgtgtgcacttcatcctggaggccgttgcagtgcagcctggagagcagcttcttagtccagaaagaaggacaaataccccaaaagccatcagcgaggaggaggaggaagtagatccaaacacacagaatcctaagtatatcactgcagcctgtgagatggtggcagaaatggtggagtctctgcagtcggtgttggccttgggtcataaaaggaatagcggcgtgccggcgtttctcacgccattgctaaggaacatcatcatcagcctggcccgcctgccccttgtcaacagctacacacgtgtgcccccactggtgtggaagcttggatggtcacccaaaccgggaggggattttggcacagcattccctgagatccccgtggagttcctccaggaaaaggaagtctttaaggagttcatctaccgcatcaacacactaggctggaccagtcgtactcagtttgaagaaacttgggccaccctccttggtgtcctggtgacgcagcccctcgtgatggagcaggaggagagcccaccagaagaagacacagagaggacccagatcaacgtcctggccgtgcaggccatcacctcactggtgctcagtgcaatgactgtgcctgtggccggcaacccagctgtaagctgcttggagcagcagccccggaacaagcctctgaaagctctcgacaccaggtttgggaggaagctgagcattatcagagggattgtggagcaagagattcaagcaatggtttcaaagagagagaatattgccacccatcatttatatcaggcatgggatcctgtcccttctctgtctccggctactacaggtgccctcatcagccacgagaagctgctgctacagatcaaccccgagcgggagctggggagcatgagctacaaactcggccaggtgtccatacactccgtgtggctggggaacagcatcacacccctgagggaggaggaatgggacgaggaagaggaggaggaggccgacgcccctgcaccttcgtcaccacccacgtctccagtcaactccaggaaacaccgggctggagttgacatccactcctgttcgcagtttttgcttgagttgtacagccgctggatcctgccgtccagctcagccaggaggaccccggccatcctgatcagtgaggtggtcagatcccttctagtggtctcagacttgttcaccgagcgcaaccagtttgagctgatgtatgtgacgctgacagaactgcgaagggtgcacccttcagaagacgagatcctcgctcagtacctggtgcctgccacctgcaaggcagctgccgtccttgggatggacaaggccgtggcggagcctgtcagccgcctgctggagagcacgctcaggagcagccacctgcccagcagggttggagccctgcacggcgtcctctatgtgctggagtgcgacctgctggacgacactgccaagcagctcatcccggtcatcagcgactatctcctctccaacctgaaagggatcgcccactgcgtgaacattcacagccagcagcacgtactggtcatgtgtgccactgcgttttacctcattgagaactatcctctggacgtagggccggaattttcagcatcaataatacagatgtgtggggtgatgctgtctggaagtgaggagtccaccccctccatcatttaccactgtgccctcagaggcctggagcgcctcctgctctctgagcagctctcccgcctggatgcagaatcgctggtcaagctgagtgtggacagagtgaacgtgcacagcccgcaccgggccatggcggctctgggcctgatgctcacctgcatgtacacaggaaaggagaaagtcagtccgggtagaacttcagaccctaatcctgcagcccccgacagcgagtcagtgattgttgctatggagcgggtatctgttctttttgataggatcaggaaaggctttccttgtgaagccagagtggtggccaggatcctgccccagtttctagacgacttcttcccaccccaggacatcatgaacaaagtcatcggagagtttctgtccaaccagcagccatacccccagttcatggccaccgtggtgtataaggtgtttcagactctgcacagcaccgggcagtcgtccatggtccgggactgggtcatgctgtccctctccaacttcacgcagagggccccggtcgccatggccacgtggagcctctcctgcttctttgtcagcgcgtccaccagcccgtgggtcgcggcgatcctcccacatgtcatcagcaggatgggcaagctggagcaggtggacgtgaaccttttctgcctggtcgccacagacttctacagacaccagatagaggaggagctcgaccgcagggccttccagtctgtgcttgaggtggttgcagccccaggaagcccatatcaccggctgctgacttgtttacgaaatgtccacaaggtcaccacctgctgagcgccatggtgggagagactgtgaggcggcagctggggccggagcctttggaagtctgcgcccttgtgccctgcctccaccgagccagcttggtccctatgggcttccgcacatgccgcgggcggccaggcaacgtgcgtgtctctgccatgtggcagaagtgctctttgtggcagtggccaggcagggagtgtctgcagtcctggtggggctgagcctgaggccttccagaaagcaggagcagctgtgctgcaccccatgtgggtgaccaggtcctttctcctgatagtcacctgctggttgttgccaggttgcagctgctcttgcatctgggccagaagtcctccctcctgcaggctggctgttggcccctctgctgtcctgcagtagaaggtgccgtgagcaggctttgggaacactggcctgggtctccctggtggggtgtgcatgccacgccccgtgtctggatgcacagatgccatggcctgtgctgggccagtggctgggggtgctagacacccggcaccattctcccttctctcttttcttctcaggatttaaaatttaattatatcagtaaagagattaattttaacgtaactctttctatgcccgtgtaaagtatgtgaatcgcaaggcctgtgctgcatgcgacagcgtccggggtggtggacagggcccccggccacgctccctctcctgtagccactggcatagccctcctgagcacccgctgacatttccgttgtacatgttcctgtttatgcattcacaaggtgactgggatgtagagaggcgttagtgggcaggtggccacagcaggactgaggacaggcccccattatcctaggggtgcgctcacctgcagcccctcctcctcgggcacagacgactgtcgttctccacccaccagtcagggacagcagcctccctgtcactcagctgagaaggccagccctccctggctgtgagcagcctccactgtgtccagagacatgggcctcccactcctgttccttgctagccctggggtggcgtctgcctaggagctggctggcaggtgttgggacctgctgctccatggatgcatgccctaagagtgtcactgagctgtgttttgtctgagcctctctcggtcaacagcaaagcttggtgtcttggcactgttagtgacagagcccagcatcccttctgcccccgttccagctgacatcttgcacggtgaccccttttagtcaggagagtgcagatctgtgctcatcggagactgccccacggccctgtcagagccgccactcctatccccaggccaggtccctggaccagcctcctgtttgcaggcccagaggagccaagtcattaaaatggaagtggattctggatggccgggctgctgctgatgtaggagctggatttgggagctctgcttgccgactggctgtgagacgaggcaggggctctgcttcctcagccctagaggcgagccaggcaaggttggcgactgtcatgtggcttggtttggtcatgcccgtcgatgttttgggtattgaatgtggtaagtggaggaaatgttggaactctgtgcaggtgctgccttgagacccccaagcttccacctgtccctctcctatgtggcagctggggagcagctgagatgtggacttgtatgctgcccacatacgtgagggggagctgaaagggagcccctcctctgagcagcctctgccaggcctgtatgaggcttttcccaccagctcccaacagaggcctcccccagccaggaccacctcgtcctcgtggcggggcagcaggagcggtagaaaggggtccgatgtttgaggaggcccttaagggaagctactgaattataacacgtaagaaaatcaccattccgtattggttgggggctcctgtttctcatcctagctttttcctggaaagcccgctagaaggtttgggaacgaggggaaagttctcagaactgttggctgctccccacccgcctcccgcctcccccgcaggttatgtcagcagctctgagacagcagtatcacaggccagatgttgttcctggctagatgtttacatttgtaagaaataacactgtgaatgtaaaacagagccattcccttggaatgcatatcgctgggctcaacatagagtttgtcttcctcttgtttacgacgtgatctaaaccagtccttagcaaggggctcagaacaccccgctctggcagtaggtgtcccccacccccaaagacctgcctgtgtgctccggagatgaatatgagctcattagtaaaaatgacttcacccacgcatatacataaagtatccatgcatgtgcatatagacacatctataattttacacacacacctctcaagacggagatgcatggcctctaagagtgcccgtgtcggttcttcctggaagttgactttccttagacccgccaggtcaagttagccgcgtgacggacatccaggcgtgggacgtggtcagggcagggctcattcattgcccactaggatcccactggcgaagatggtctccatatcagctctctgcagaagggaggaagactttatcatgttcctaaaaatctgtggcaagcacccatcgtattatccaaattttgttgcaaatgtgattaatttggttgtcaagttttgggggtgggctgtggggagattgcttttgttttcctgctggtaatatcgggaaagattttaatgaaaccagggtagaattgtttggcaatgcactgaagcgtgtttctttcccaaaatgtgcctcccttccgctgcgggcccagctgagtctatgtaggtgatgtttccagctgccaagtgctctttgttactgtccaccctcatttctgccagcgcatgtgtcctttcaaggggaaaatgtgaagctgaaccccctccagacacccagaatgtagcatctgagaaggccctgtgccctaaaggacacccctcgcccccatcttcatggagggggtcatttcagagccctcggagccaatgaacagctcctcctcttggagctgagatgagccccacgtggagctcgggacggatagtagacagcaataactcggtgtgtggccgcctggcaggtggaacttcctcccgttgcggggtggagtgaggttagttctgtgtgtctggtgggtggagtcaggcttctcttgctacctgtgagcatccttcccagcagacatcctcatcgggctttgtccctcccccgcttcctccctctgcggggaggacccgggaccacagctgctggccagggtagacttggagctgtcctccagaggggtcacgtgtaggagtgagaagaaggaagatcttgagagctgctgagggaccttggagagctcaggatggctcagacgaggacactcgcttgccgggcctgggcctcctgggaaggagggagctgctcagaatgccgcatgacaactgaaggcaacctggaaggttcaggggccgctcttcccccatgtgcctgtcacgctctggtgcagtcaaaggaacgccttcccctcagttgtttctaagagcagagtctcccgctgcaatctgggtggtaactgccagccttggaggatcgtggccaacgtggacctgcctacggagggtgggctctgacccaagtggggcctccttgtccaggtctcactgctttgcaccgtggtcagagggactgtcagctgagcttgagctcccctggagccagcagggctgtgatgggcgagtcccggagccccacccagacctgaatgcttctgagagcaaagggaaggactgacgagagatgtatatttaattttttaactgctgcaaacattgtacatccaaattaaaggaaaaaaatggaaaccatcaaaaaaaaaaaaaaaaaa

SEQ ID NO: 1755 - protein, 3137 aa, Homo sapiens
MATLEKLMKAFESLKSFQQQQQQQQQQQQQQQQQQQQQQQPPPPPPPPPPPQLPQPPPQAQPLLPQPQPPPPPPPPPPGPAVAEEPLHRPKKELSATKKDRVNHCLTICENIVAQSVRNSPEFQKLLGIAMELFLLCSDDAESDVRMVADECLNKVIKALMDSNLPRLQLELYKEIKKNGAPRSLRAALWRFAELAHLVRPQKCRPYLVNLLPCLTRTSKRPEESVQETLAAAVPKIMASFGNFANDNEIKVLLKAFIANLKSSSPTIRRTAAGSAVSICQHSRRTQYFYSWLLNVLLGLLVPVEDEHSTLLILGVLLTLRYLVPLLQQQVKTSLKGSFGVTRKEMEVSPSAEQLVQVYELTLHHTQHQDHNVVTGALELLQQLFRTPPPELLQTLTAVGGIGQLTAAKEESGGRSRSGSIVELIAGGGSSCSPVLSRKQKGKVLLGEEEALEDDSESRSDVSSSALTASVKDEISGELAASSGVSTPGSAGHDIITEQPRSQHTLQADSVDLASCDLTSSATDGDEEDILSHSSSQVSAVPSDPAMDLNDGTQASSPISDSSQTTTEGPDSAVTPSDSSEIVLDGTDNQYLGLQIGQPQDEDEEATGILPDEASEAFRNSSMALQQAHLLKNMSHCRQPSDSSVDKFVLRDEATEPGDQENKPCRIKGDIGQSTDDDSAPLVHCVRLLSASFLLTGGKNVLVPDRDVRVSVKALALSCVGAAVALHPESFFSKLYKVPLTTEYPEEQYVSDILNYIDHGDPQVRGATAILCGTLICSILSRSRFHVGDWMGTIRTLTGNTFSLADCIPLLRKTLKDESSVTCKLACTAVRNCVMSLCSSSYSELGLQLIIDVLTLRNSSYWLVRTELLETLAEIDFRLVSFLEAKAENLHRGAHHYTGLLKLQERVLNNVVIHLLGDEDPRVRHVAAASLIRLVPKLFYKCDQGQADPVVAVARDQSSVYLKLLMHETQPPSHFSVSTITRIYRGYNLLPSITDVTMENNLSRVIAAVSHELITSTTRALTFGCCEALCLLSTAFPVCIWSLGWHCGVPPLSASDESRKSCTVGMATMILTLLSSAWFPLDLSAHQDALILAGNLLAASAPKSLRSSWASEEEANPAATKQEEVWPALGDRALVPMVEQLFSHLLKVINICAHVLDDVAPGPAIKAALPSLTNPPSLSPIRRKGKEKEPGEQASVPLSPKKGSEASAASRQSTSGPVTTSKSSSLGSFYHLPSYLKLHDVLKATHANYKVTLDLQNSTEKFGGFLRSALDVLSQILELATLQDIGKCVEEILGYLKSCFSREPMMATVCVQQLLKTLFGTNLASQFDGLSSNPSKSQGRAQRLGSSSVRPGLYHYCFMAPYTHFTQALADASLRNMVQAEQENTSGWFDVLQKVSTQLKTNLTSVTKNRADKNAIHNHIRLFEPLVIKALKQYTTTTCVQLQKQVLDLLAQLVQLRVNYCLLDSDQVFIGFVLKQFEYIEVGQFRESEAIIPNIFFFLVLLSYERYHSKQIIGIPKIIQLCDGIMASGRKAVTHAIPALQPIVHDLFVLRGTNKADAGKELETQKEVVVSMLLRLIQYHQVLEMFILVLQQCHKENEDKWKRLSRQIADIILPMLAKQQMHIDSHEALGVLNTLFEILAPSSLRPVDMLLRSMFVTPNTMASVSTVQLWISGILAILRVLISQSTEDIVLSRIQELSFSPYLISCTVINRLRDGDSTSTLEEHSEGKQIKNLPEETFSRFLLQLVGILLEDIVTKQLKVEMSEQQHTFYCQELGTLLMCLIHIFKSGMFRRITAAATRLFRSDGCGGSFYTLDSLNLRARSMITTHPALVLLWCQILLLVNHTDYRWWAEVQQTPKRHSLSSTKLLSPQMSGEEEDSDLAAKLGMCNREIVRRGALILFCDYVCQNLHDSEHLTWLIVNHIQDLISLSHEPPVQDFISAVHRNSAASGLFIQAIQSRCENLSTPTMLKKTLQCLEGIHLSQSGAVLTLYVDRLLCTPFRVLARMVDILACRRVEMLLAANLQSSMAQLPMEELNRIQEYLQSSGLAQRHQRLYSLLDRFRLSTMQDSLSPSPPVSSHPLDGDGHVSLETVSPDKDWYVHLVKSQCWTRSDSALLEGAELVNRIPAEDMNAFMMNSEFNLSLLAPCLSLGMSEISGGQKSALFEAAREVTLARVSGTVQQLPAVHHVFQPELPAEPAAYWSKLNDLFGDAALYQSLPTLARALAQYLVVVSKLPSHLHLPPEKEKDIVKFVVATLEALSWHLIHEQIPLSLDLQAGLDCCCLALQLPGLWSVVSSTEFVTHACSLIYCVHFILEAVAVQPGEQLLSPERRTNTPKAISEEEEEVDPNTQNPKYITAACEMVAEMVESLQSVLALGHKRNSGVPAFLTPLLRNIIISLARLPLVNSYTRVPPLVWKLGWSPKPGGDFGTAFPEIPVEFLQEKEVFKEFIYRINTLGWTSRTQFEETWATLLGVLVTQPLVMEQEESPPEETERTQINVLAVQAITSLVLSAMTVPVAGNPAVSCLEQQPRNKPLKALTRFGRKLSIIRGIVEQEIQAMVSKRENIATHHLYQAWDPVPSLSPATTGALISHEKLLLQINPERELGSMSYKLGQVSIHSVWLGNSITPLREEEWDEEEEEEADAPAPSSPPTSPVNSRKHRAGVDIHSCSQFLLELYSRWILPSSSARRTPAILISEVVRSLLVVSDLFTERNQFELMYVTLTELRRVHPSEDEILAQYLVPATCKAAAVLGMDKAVAEPVSRLLESTLRSSHLPSRVGALHGVLYVLECDLLDTAKQLIPVISDYLLSNLKGIAHCVNIHSQQHVLVMCATAFYLIENYPLDVGPEFSASIIQMCGVMLSGSEESTPSIIYHCALRGLERLLLSEQLSRLDAESLVKLSVDRVNVHSPHRAMAALGLMLTCMYTGKEKVSPGRTSDPNPAAPDSESVIVAMERVSVLFDRIRKGFPCEARVVARILPQFLDDFFPPQDIMNKVIGEFLSNQQPYPQFMATVVYKVFQTLHSTGQSSMVRDWVMLSLSNFTQRAPVAMATWSLSCFFVSASTSPWVAAILPHVISRMGKLEQVDVNLFCLVATDFYRHQIEEELDRRAFQSVLEVVAAPGSPYHRLLTCLRNVHKVTTC

SEQ ID NO: 1756 - protein, 758 aa, Homo sapiens
MAEPRQEFEVMEDHAGTYGLGDRKDQGGYTMHQDQEGDTDAGLKESPLQTPTEDGSEEPGSETSDAKSTPTAEDVTAPLVDEGAPGKQAAAQPHTEIPEGTTAEEAGIGDTPSLEDEAAGHVTQEPESGKVVQEGFLREPGPPGLSHQLMSGMPGAPLLPEGPREATRQPSGTGPEDTEGGRHAPELLKHQLLGDLHQEGPPLKGAGGKERPGSKEEVDEDRDVDESSPQDSPPSKASPAQDGRPPQTAAREATSIPGFPAEGAIPLPVDFLSKVSTEIPASEPDGPSVGRAKGQDAPLEFTFHVEITPNVQKEQAHSEEHLGRAAFPGAPGEGPEARGPSLGEDTKEADLPEPSEKQPAAAPRGKPVSRVPQLKARMVSKSKDGTGSDDKKAKTSTRSSAKTLKNRPCLSPKHPTPGSSDPLIQPSSPAVCPEPPSSPKYVSSVTSRTGSSGAKEMKLKGADGKTKIATPRGAAPPGQKGQANATRIPAKTPPAPKTPPSSGEPPKSGDRSGYSSPGSPGTPGSRSRTPSLPTPPTREPKKVAVVRTPPKSPSSAKSRLQTAPVPMPDLKNVKSKIGSTENLKHQPGGGKVQIINKKLDLSNVQSKCGSKDNIKHVPGGGSVQIVYKPVDLSKVTSKCGSLGNIHHKPGGGQVEVKSEKLDFKDRVQSKIGSLDNITHVPGGGNKKIETHKLTFRENAKAKTDHGAEIVYKSPVVSGDTSPRHLSNVSSTGSIDMVDSPQLATLADEVSASLAKQGL

SEQ ID NO: 1757 - protein, 441 aa, Homo sapiens
MAEPRQEFEVMEDHAGTYGLGDRKDQGGYTMHQDQEGDTDAGLKESPLQTPTEDGSEEPGSETSDAKSTPTAEDVTAPLVDEGAPGKQAAAQPHTEIPEGTTAEEAGIGDTPSLEDEAAGHVTQARMVSKSKDGTGSDDKKAKGADGKTKIATPRGAAPPGQKGQANATRIPAKTPPAPKTPPSSGEPPKSGDRSGYSSPGSPGTPGSRSRTPSLPTPPTREPKKVAVVRTPPKSPSSAKSRLQTAPVPMPDLKNVKSKIGSTENLKHQPGGGKVQIINKKLDLSNVQSKCGSKDNIKHVPGGGSVQIVYKPVDLSKVTSKCGSLGNIHHKPGGGQVEVKSEKLDFKDRVQSKIGSLDNITHVPGGGNKKIETHKLTFRENAKAKTDHGAEIVYKSPVVSGDTSPRHLSNVSSTGSIDMVDSPQLATLADEVSASLAKQGL

SEQ ID NO: 1758 - protein, 383 aa, Homo sapiens
MAEPRQEFEVMEDHAGTYGLGDRKDQGGYTMHQDQEGDTDAGLKAEEAGIGDTPSLEDEAAGHVTQARMVSKSKDGTGSDDKKAKGADGKTKIATPRGAAPPGQKGQANATRIPAKTPPAPKTPPSSGEPPKSGDRSGYSSPGSPGTPGSRSRTPSLPTPPTREPKKVAVVRTPPKSPSSAKSRLQTAPVPMPDLKNVKSKIGSTENLKHQPGGGKVQIINKKLDLSNVQSKCGSKDNIKHVPGGGSVQIVYKPVDLSKVTSKCGSLGNIHHKPGGGQVEVKSEKLDFKDRVQSKIGSLDNITHVPGGGNKKIETHKLTFRENAKAKTDHGAEIVYKSPVVSGDTSPRHLSNVSSTGSIDMVDSPQLATLADEVSASLAKQGL

SEQ ID NO: 1759 - protein, 352 aa, Homo sapiens
MAEPRQEFEVMEDHAGTYGLGDRKDQGGYTMHQDQEGDTDAGLKAEEAGIGDTPSLEDEAAGHVTQARMVSKSKDGTGSDDKKAKGADGKTKIATPRGAAPPGQKGQANATRIPAKTPPAPKTPPSSGEPPKSGDRSGYSSPGSPGTPGSRSRTPSLPTPPTREPKKVAVVRTPPKSPSSAKSRLQTAPVPMPDLKNVKSKIGSTENLKHQPGGGKVQIVYKPVDLSKVTSKCGSLGNIHHKPGGGQVEVKSEKLDFKDRVQSKIGSLDNITHVPGGGNKKIETHKLTFRENAKAKTDHGAEIVYKSPVVSGDTSPRHLSNVSSTGSIDMVDSPQLATLADEVSASLAKQGL

SEQ ID NO: 1760 - protein, 412 aa, Homo sapiens
MAEPRQEFEVMEDHAGTYGLGDRKDQGGYTMHQDQEGDTDAGLKESPLQTPTEDGSEEPGSETSDAKSTPTAEAEEAGIGDTPSLEDEAAGHVTQARMVSKSKDGTGSDDKKAKGADGKTKIATPRGAAPPGQKGQANATRIPAKTPPAPKTPPSSGEPPKSGDRSGYSSPGSPGTPGSRSRTPSLPTPPTREPKKVAVVRTPPKSPSSAKSRLQTAPVPMPDLKNVKSKIGSTENLKHQPGGGKVQIINKKLDLSNVQSKCGSKDNIKHVPGGGSVQIVYKPVDLSKVTSKCGSLGNIHHKPGGGQVEVKSEKLDFKDRVQSKIGSLDNITHVPGGGNKKIETHKLTFRENAKAKTDHGAEIVYKSPVVSGDTSPRHLSNVSSTGSIDMVDSPQLATLADEVSASLAKQGL

SEQ ID NO: 1761 - protein, 776 aa, Homo sapiens
MAEPRQEFEVMEDHAGTYGLGDRKDQGGYTMHQDQEGDTDAGLKESPLQTPTEDGSEEPGSETSDAKSTPTAEDVTAPLVDEGAPGKQAAAQPHTEIPEGTTAEEAGIGDTPSLEDEAAGHVTQEPESGKVVQEGFLREPGPPGLSHQLMSGMPGAPLLPEGPREATRQPSGTGPEDTEGGRHAPELLKHQLLGDLHQEGPPLKGAGGKERPGSKEEVDEDRDVDESSPQDSPPSKASPAQDGRPPQTAAREATSIPGFPAEGAIPLPVDFLSKVSTEIPASEPDGPSVGRAKGQDAPLEFTFHVEITPNVQKEQAHSEEHLGRAAFPGAPGEGPEARGPSLGEDTKEADLPEPSEKQPAAAPRGKPVSRVPQLKARMVSKSKDGTGSDDKKAKTSTRSSAKTLKNRPCLSPKHPTPGSSDPLIQPSSPAVCPEPPSSPKYVSSVTSRTGSSGAKEMKLKGADGKTKIATPRGAAPPGQKGQANATRIPAKTPPAPKTPPSSATKQVQRRPPPAGPRSERGEPPKSGDRSGYSSPGSPGTPGSRSRTPSLPTPPTREPKKVAVVRTPPKSPSSAKSRLQTAPVPMPDLKNVKSKIGSTENLKHQPGGGKVQIINKKLDLSNVQSKCGSKDNIKHVPGGGSVQIVYKPVDLSKVTSKCGSLGNIHHKPGGGQVEVKSEKLDFKDRVQSKIGSLDNITHVPGGGNKKIETHKLTFRENAKAKTDHGAEIVYKSPVVSGDTSPRHLSNVSSTGSIDMVDSPQLATLADEVSASLAKQGL

SEQ ID NO: 1762 - protein, 381 aa, Homo sapiens
MAEPRQEFEVMEDHAGTYGLGDRKDQGGYTMHQDQEGDTDAGLKESPLQTPTEDGSEEPGSETSDAKSTPTAEAEEAGIGDTPSLEDEAAGHVTQARMVSKSKDGTGSDDKKAKGADGKTKIATPRGAAPPGQKGQANATRIPAKTPPAPKTPPSSGEPPKSGDRSGYSSPGSPGTPGSRSRTPSLPTPPTREPKKVAVVRTPPKSPSSAKSRLQTAPVPMPDLKNVKSKIGSTENLKHQPGGGKVQIVYKPVDLSKVTSKCGSLGNIHHKPGGGQVEVKSEKLDFKDRVQSKIGSLDNITHVPGGGNKKIETHKLTFRENAKAKTDHGAEIVYKSPVVSGDTSPRHLSNVSSTGSIDMVDSPQLATLADEVSASLAKQGL

SEQ ID NO: 1763 - protein, 410 aa, Homo sapiens
MAEPRQEFEVMEDHAGTYGLGDRKDQGGYTMHQDQEGDTDAGLKESPLQTPTEDGSEEPGSETSDAKSTPTAEDVTAPLVDEGAPGKQAAAQPHTEIPEGTTAEEAGIGDTPSLEDEAAGHVTQARMVSKSKDGTGSDDKKAKGADGKTKIATPRGAAPPGQKGQANATRIPAKTPPAPKTPPSSGEPPKSGDRSGYSSPGSPGTPGSRSRTPSLPTPPTREPKKVAVVRTPPKSPSSAKSRLQTAPVPMPDLKNVKSKIGSTENLKHQPGGGKVQIVYKPVDLSKVTSKCGSLGNIHHKPGGGQVEVKSEKLDFKDRVQSKIGSLDNITHVPGGGNKKIETHKLTFRENAKAKTDHGAEIVYKSPVVSGDTSPRHLSNVSSTGSIDMVDSPQLATLADEVSASLAKQGL

SEQ ID NO: 1764 - DNA, 6762 bp, Homo sapiens
ggacggccgagcggcagggcgctcgcgcgcgcccactagtggccggaggagaaggctcccgcggaggccgcgctgcccgccccctcccctggggaggctcgcgttcccgctgctcgcgcctgcgccgcccgccggcctcaggaacgcgccctcttcgccggcgcgcgccctcgcagtcaccgccacccaccagctccggcaccaacagcagcgccgctgccaccgcccaccttctgccgccgccaccacagccaccttctcctcctccgctgtcctctcccgtcctcgcctctgtcgactatcaggtgaactttgaaccaggatggctgagccccgccaggagttcgaagtgatggaagatcacgctgggacgtacgggttgggggacaggaaagatcaggggggctacaccatgcaccaagaccaagagggtgacacggacgctggcctgaaagaatctcccctgcagacccccactgaggacggatctgaggaaccgggctctgaaacctctgatgctaagagcactccaacagcggaagatgtgacagcacccttagtggatgagggagctcccggcaagcaggctgccgcgcagccccacacggagatcccagaaggaaccacagctgaagaagcaggcattggagacacccccagcctggaagacgaagctgctggtcacgtgacccaagagcctgaaagtggtaaggtggtccaggaaggcttcctccgagagccaggccccccaggtctgagccaccagctcatgtccggcatgcctggggctcccctcctgcctgagggccccagagaggccacacgccaaccttcggggacaggacctgaggacacagagggcggccgccacgcccctgagctgctcaagcaccagcttctaggagacctgcaccaggaggggccgccgctgaagggggcagggggcaaagagaggccggggagcaaggaggaggtggatgaagaccgcgacgtcgatgagtcctccccccaagactcccctccctccaaggcctccccagcccaagatgggcggcctccccagacagccgccagagaagccaccagcatcccaggcttcccagcggagggtgccatccccctccctgtggatttcctctccaaagtttccacagagatcccagcctcagagcccgacgggcccagtgtagggcgggccaaagggcaggatgcccccctggagttcacgtttcacgtggaaatcacacccaacgtgcagaaggagcaggcgcactcggaggagcatttgggaagggctgcatttccaggggcccctggagaggggccagaggcccggggcccctctttgggagaggacacaaaagaggctgaccttccagagccctctgaaaagcagcctgctgctgctccgcgggggaagcccgtcagccgggtccctcaactcaaagctcgcatggtcagtaaaagcaaagacgggactggaagcgatgacaaaaaagccaagacatccacacgttcctctgctaaaaccttgaaaaataggccttgccttagccccaaacaccccactcctggtagctcagaccctctgatccaaccctccagccctgctgtgtgcccagagccaccttcctctcctaaatacgtctcttctgtcacttcccgaactggcagttctggagcaaaggagatgaaactcaagggggctgatggtaaaacgaagatcgccacaccgcggggagcagcccctccaggccagaagggccaggccaacgccaccaggattccagcaaaaaccccgcccgctccaaagacaccacccagctctggtgaacctccaaaatcaggggatcgcagcggctacagcagccccggctccccaggcactcccggcagccgctcccgcaccccgtcccttccaaccccacccacccgggagcccaagaaggtggcagtggtccgtactccacccaagtcgccgtcttccgccaagagccgcctgcagacagcccccgtgcccatgccagacctgaagaatgtcaagtccaagatcggctccactgagaacctgaagcaccagccgggaggcgggaaggtgcagataattaataagaagctggatcttagcaacgtccagtccaagtgtggctcaaaggataatatcaaacacgtcccgggaggcggcagtgtgcaaatagtctacaaaccagttgacctgagcaaggtgacctccaagtgtggctcattaggcaacatccatcataaaccaggaggtggccaggtggaagtaaaatctgagaagcttgacttcaaggacagagtccagtcgaagattgggtccctggacaatatcacccacgtccctggcggaggaaataaaaagattgaaacccacaagctgaccttccgcgagaacgccaaagccaagacagaccacggggcggagatcgtgtacaagtcgccagtggtgtctggggacacgtctccacggcatctcagcaatgtctcctccaccggcagcatcgacatggtagactcgccccagctcgccacgctagctgacgaggtgtctgcctccctggccaagcagggtttgtgatcaggcccctggggcggtcaataattgtggagaggagagaatgagagagtgtggaaaaaaaaagaataatgacccggcccccgccctctgcccccagctgctcctcgcagttcggttaattggttaatcacttaacctgcttttgtcactcggctttggctcgggacttcaaaatcagtgatgggagtaagagcaaatttcatctttccaaattgatgggtgggctagtaataaaatatttaaaaaaaaacattcaaaaacatggccacatccaacatttcctcaggcaattccttttgattcttttttcttccccctccatgtagaagagggagaaggagaggctctgaaagctgcttctgggggatttcaagggactgggggtgccaaccacctctggccctgttgtgggggtgtcacagaggcagtggcagcaacaaaggatttgaaacttggtgtgttcgtggagccacaggcagacgatgtcaaccttgtgtgagtgtgacgggggttggggtggggcgggaggccacgggggaggccgaggcaggggctgggcagaggggagaggaagcacaagaagtgggagtgggagaggaagccacgtgctggagagtagacatccccctccttgccgctgggagagccaaggcctatgccacctgcagcgtctgagcggccgcctgtccttggtggccgggggtgggggcctgctgtgggtcagtgtgccaccctctgcagggcagcctgtgggagaagggacagcgggtaaaaagagaaggcaagctggcaggagggtggcacttcgtggatgacctccttagaaaagactgaccttgatgtcttgagagcgctggcctcttcctccctccctgcagggtagggggcctgagttgaggggcttccctctgctccacagaaaccctgttttattgagttctgaaggttggaactgctgccatgattttggccactttgcagacctgggactttagggctaaccagttctctttgtaaggacttgtgcctcttgggagacgtccacccgtttccaagcctgggccactggcatctctggagtgtgtgggggtctgggaggcaggtcccgagccccctgtccttcccacggccactgcagtcaccccgtctgcgccgctgtgctgttgtctgccgtgagagcccaatcactgcctatacccctcatcacacgtcacaatgtcccgaattcccagcctcaccaccccttctcagtaatgaccctggttggttgcaggaggtacctactccatactgagggtgaaattaagggaaggcaaagtccaggcacaagagtgggaccccagcctctcactctcagttccactcatccaactgggaccctcaccacgaatctcatgatctgattcggttccctgtctcctcctcccgtcacagatgtgagccagggcactgctcagctgtgaccctaggtgtttctgccttgttgacatggagagagccctttcccctgagaaggcctggccccttcctgtgctgagcccacagcagcaggctgggtgtcttggttgtcagtggtggcaccaggatggaagggcaaggcacccagggcaggcccacagtcccgctgtcccccacttgcaccctagcttgtagctgccaacctcccagacagcccagcccgctgctcagctccacatgcatagtatcagccctccacacccgacaaaggggaacacacccccttggaaatggttcttttcccccagtcccagctggaagccatgctgtctgttctgctggagcagctgaacatatacatagatgttgccctgccctccccatctgcaccctgttgagttgtagttggatttgtctgtttatgcttggattcaccagagtgactatgatagtgaaaagaaaaaaaaaaaaaaaaaaggacgcatgtatcttgaaatgcttgtaaagaggtttctaacccaccctcacgaggtgtctctcacccccacactgggactcgtgtggcctgtgtggtgccaccctgctggggcctcccaagttttgaaaggctttcctcagcacctgggacccaacagagaccagcttctagcagctaaggaggccgttcagctgtgacgaaggcctgaagcacaggattaggactgaagcgatgatgtccccttccctacttccccttggggctccctgtgtcagggcacagactaggtcttgtggctggtctggcttgcggcgcgaggatggttctctctggtcatagcccgaagtctcatggcagtcccaaaggaggcttacaactcctgcatcacaagaaaaaggaagccactgccagctggggggatctgcagctcccagaagctccgtgagcctcagccacccctcagactgggttcctctccaagctcgccctctggaggggcagcgcagcctcccaccaagggccctgcgaccacagcagggattgggatgaattgcctgtcctggatctgctctagaggcccaagctgcctgcctgaggaaggatgacttgacaagtcaggagacactgttcccaaagccttgaccagagcacctcagcccgctgaccttgcacaaactccatctgctgccatgagaaaagggaagccgcctttgcaaaacattgctgcctaaagaaactcagcagcctcaggcccaattctgccacttctggtttgggtacagttaaaggcaaccctgagggacttggcagtagaaatccagggcctcccctggggctggcagcttcgtgtgcagctagagctttacctgaaaggaagtctctgggcccagaactctccaccaagagcctccctgccgttcgctgagtcccagcaattctcctaagttgaagggatctgagaaggagaaggaaatgtggggtagatttggtggtggttagagatatgcccccctcattactgccaacagtttcggctgcatttcttcacgcacctcggttcctcttcctgaagttcttgtgccctgctcttcagcaccatgggccttcttatacggaaggctctgggatctcccccttgtggggcaggctcttggggccagcctaagatcatggtttagggtgatcagtgctggcagataaattgaaaaggcacgctggcttgtgatcttaaatgaggacaatccccccagggctgggcactcctcccctcccctcacttctcccacctgcagagccagtgtccttgggtgggctagataggatatactgtatgccggctccttcaagctgctgactcactttatcaatagttccatttaaattgacttcagtggtgagactgtatcctgtttgctattgcttgttgtgctatggggggaggggggaggaatgtgtaagatagttaacatgggcaaagggagatcttggggtgcagcacttaaactgcctcgtaacccttttcatgatttcaaccacatttgctagagggagggagcagccacggagttagaggcccttggggtttctcttttccactgacaggctttcccaggcagctggctagttcattccctccccagccaggtgcaggcgtaggaatatggacatctggttgctttggcctgctgccctctttcaggggtcctaagcccacaatcatgcctccctaagaccttggcatccttccctctaagccgttggcacctctgtgccacctctcacactggctccagacacacagcctgtgcttttggagctgagatcactcgcttcaccctcctcatctttgttctccaagtaaagccacgaggtcggggcgagggcagaggtgatcacctgcgtgtcccatctacagacctgcagcttcataaaacttctgatttctcttcagctttgaaaagggttaccctgggcactggcctagagcctcacctcctaatagacttagccccatgagtttgccatgttgagcaggactatttctggcacttgcaagtcccatgatttcttcggtaattctgagggtggggggagggacatgaaatcatcttagcttagctttctgtctgtgaatgtctatatagtgtattgtgtgttttaacaaatgatttacactgactgttgctgtaaaagtgaatttggaaataaagttattactctgattaaa

SEQ ID NO: 1765 - DNA, 5811 bp, Homo sapiens
ggacggccgagcggcagggcgctcgcgcgcgcccactagtggccggaggagaaggctcccgcggaggccgcgctgcccgccccctcccctggggaggctcgcgttcccgctgctcgcgcctgcgccgcccgccggcctcaggaacgcgccctcttcgccggcgcgcgccctcgcagtcaccgccacccaccagctccggcaccaacagcagcgccgctgccaccgcccaccttctgccgccgccaccacagccaccttctcctcctccgctgtcctctcccgtcctcgcctctgtcgactatcaggtgaactttgaaccaggatggctgagccccgccaggagttcgaagtgatggaagatcacgctgggacgtacgggttgggggacaggaaagatcaggggggctacaccatgcaccaagaccaagagggtgacacggacgctggcctgaaagaatctcccctgcagacccccactgaggacggatctgaggaaccgggctctgaaacctctgatgctaagagcactccaacagcggaagatgtgacagcacccttagtggatgagggagctcccggcaagcaggctgccgcgcagccccacacggagatcccagaaggaaccacagctgaagaagcaggcattggagacacccccagcctggaagacgaagctgctggtcacgtgacccaagctcgcatggtcagtaaaagcaaagacgggactggaagcgatgacaaaaaagccaagggggctgatggtaaaacgaagatcgccacaccgcggggagcagcccctccaggccagaagggccaggccaacgccaccaggattccagcaaaaaccccgcccgctccaaagacaccacccagctctggtgaacctccaaaatcaggggatcgcagcggctacagcagccccggctccccaggcactcccggcagccgctcccgcaccccgtcccttccaaccccacccacccgggagcccaagaaggtggcagtggtccgtactccacccaagtcgccgtcttccgccaagagccgcctgcagacagcccccgtgcccatgccagacctgaagaatgtcaagtccaagatcggctccactgagaacctgaagcaccagccgggaggcgggaaggtgcagataattaataagaagctggatcttagcaacgtccagtccaagtgtggctcaaaggataatatcaaacacgtcccgggaggcggcagtgtgcaaatagtctacaaaccagttgacctgagcaaggtgacctccaagtgtggctcattaggcaacatccatcataaaccaggaggtggccaggtggaagtaaaatctgagaagcttgacttcaaggacagagtccagtcgaagattgggtccctggacaatatcacccacgtccctggcggaggaaataaaaagattgaaacccacaagctgaccttccgcgagaacgccaaagccaagacagaccacggggcggagatcgtgtacaagtcgccagtggtgtctggggacacgtctccacggcatctcagcaatgtctcctccaccggcagcatcgacatggtagactcgccccagctcgccacgctagctgacgaggtgtctgcctccctggccaagcagggtttgtgatcaggcccctggggcggtcaataattgtggagaggagagaatgagagagtgtggaaaaaaaaagaataatgacccggcccccgccctctgcccccagctgctcctcgcagttcggttaattggttaatcacttaacctgcttttgtcactcggctttggctcgggacttcaaaatcagtgatgggagtaagagcaaatttcatctttccaaattgatgggtgggctagtaataaaatatttaaaaaaaaacattcaaaaacatggccacatccaacatttcctcaggcaattccttttgattcttttttcttccccctccatgtagaagagggagaaggagaggctctgaaagctgcttctgggggatttcaagggactgggggtgccaaccacctctggccctgttgtgggggtgtcacagaggcagtggcagcaacaaaggatttgaaacttggtgtgttcgtggagccacaggcagacgatgtcaaccttgtgtgagtgtgacgggggttggggtggggcgggaggccacgggggaggccgaggcaggggctgggcagaggggagaggaagcacaagaagtgggagtgggagaggaagccacgtgctggagagtagacatccccctccttgccgctgggagagccaaggcctatgccacctgcagcgtctgagcggccgcctgtccttggtggccgggggtgggggcctgctgtgggtcagtgtgccaccctctgcagggcagcctgtgggagaagggacagcgggtaaaaagagaaggcaagctggcaggagggtggcacttcgtggatgacctccttagaaaagactgaccttgatgtcttgagagcgctggcctcttcctccctccctgcagggtagggggcctgagttgaggggcttccctctgctccacagaaaccctgttttattgagttctgaaggttggaactgctgccatgattttggccactttgcagacctgggactttagggctaaccagttctctttgtaaggacttgtgcctcttgggagacgtccacccgtttccaagcctgggccactggcatctctggagtgtgtgggggtctgggaggcaggtcccgagccccctgtccttcccacggccactgcagtcaccccgtctgcgccgctgtgctgttgtctgccgtgagagcccaatcactgcctatacccctcatcacacgtcacaatgtcccgaattcccagcctcaccaccccttctcagtaatgaccctggttggttgcaggaggtacctactccatactgagggtgaaattaagggaaggcaaagtccaggcacaagagtgggaccccagcctctcactctcagttccactcatccaactgggaccctcaccacgaatctcatgatctgattcggttccctgtctcctcctcccgtcacagatgtgagccagggcactgctcagctgtgaccctaggtgtttctgccttgttgacatggagagagccctttcccctgagaaggcctggccccttcctgtgctgagcccacagcagcaggctgggtgtcttggttgtcagtggtggcaccaggatggaagggcaaggcacccagggcaggcccacagtcccgctgtcccccacttgcaccctagcttgtagctgccaacctcccagacagcccagcccgctgctcagctccacatgcatagtatcagccctccacacccgacaaaggggaacacacccccttggaaatggttcttttcccccagtcccagctggaagccatgctgtctgttctgctggagcagctgaacatatacatagatgttgccctgccctccccatctgcaccctgttgagttgtagttggatttgtctgtttatgcttggattcaccagagtgactatgatagtgaaaagaaaaaaaaaaaaaaaaaaggacgcatgtatcttgaaatgcttgtaaagaggtttctaacccaccctcacgaggtgtctctcacccccacactgggactcgtgtggcctgtgtggtgccaccctgctggggcctcccaagttttgaaaggctttcctcagcacctgggacccaacagagaccagcttctagcagctaaggaggccgttcagctgtgacgaaggcctgaagcacaggattaggactgaagcgatgatgtccccttccctacttccccttggggctccctgtgtcagggcacagactaggtcttgtggctggtctggcttgcggcgcgaggatggttctctctggtcatagcccgaagtctcatggcagtcccaaaggaggcttacaactcctgcatcacaagaaaaaggaagccactgccagctggggggatctgcagctcccagaagctccgtgagcctcagccacccctcagactgggttcctctccaagctcgccctctggaggggcagcgcagcctcccaccaagggccctgcgaccacagcagggattgggatgaattgcctgtcctggatctgctctagaggcccaagctgcctgcctgaggaaggatgacttgacaagtcaggagacactgttcccaaagccttgaccagagcacctcagcccgctgaccttgcacaaactccatctgctgccatgagaaaagggaagccgcctttgcaaaacattgctgcctaaagaaactcagcagcctcaggcccaattctgccacttctggtttgggtacagttaaaggcaaccctgagggacttggcagtagaaatccagggcctcccctggggctggcagcttcgtgtgcagctagagctttacctgaaaggaagtctctgggcccagaactctccaccaagagcctccctgccgttcgctgagtcccagcaattctcctaagttgaagggatctgagaaggagaaggaaatgtggggtagatttggtggtggttagagatatgcccccctcattactgccaacagtttcggctgcatttcttcacgcacctcggttcctcttcctgaagttcttgtgccctgctcttcagcaccatgggccttcttatacggaaggctctgggatctcccccttgtggggcaggctcttggggccagcctaagatcatggtttagggtgatcagtgctggcagataaattgaaaaggcacgctggcttgtgatcttaaatgaggacaatccccccagggctgggcactcctcccctcccctcacttctcccacctgcagagccagtgtccttgggtgggctagataggatatactgtatgccggctccttcaagctgctgactcactttatcaatagttccatttaaattgacttcagtggtgagactgtatcctgtttgctattgcttgttgtgctatggggggaggggggaggaatgtgtaagatagttaacatgggcaaagggagatcttggggtgcagcacttaaactgcctcgtaacccttttcatgatttcaaccacatttgctagagggagggagcagccacggagttagaggcccttggggtttctcttttccactgacaggctttcccaggcagctggctagttcattccctccccagccaggtgcaggcgtaggaatatggacatctggttgctttggcctgctgccctctttcaggggtcctaagcccacaatcatgcctccctaagaccttggcatccttccctctaagccgttggcacctctgtgccacctctcacactggctccagacacacagcctgtgcttttggagctgagatcactcgcttcaccctcctcatctttgttctccaagtaaagccacgaggtcggggcgagggcagaggtgatcacctgcgtgtcccatctacagacctgcagcttcataaaacttctgatttctcttcagctttgaaaagggttaccctgggcactggcctagagcctcacctcctaatagacttagccccatgagtttgccatgttgagcaggactatttctggcacttgcaagtcccatgatttcttcggtaattctgagggtggggggagggacatgaaatcatcttagcttagctttctgtctgtgaatgtctatatagtgtattgtgtgttttaacaaatgatttacactgactgttgctgtaaaagtgaatttggaaataaagttattactctgattaaa

SEQ ID NO: 1766 - DNA, 5637 bp, Homo sapiens
ggacggccgagcggcagggcgctcgcgcgcgcccactagtggccggaggagaaggctcccgcggaggccgcgctgcccgccccctcccctggggaggctcgcgttcccgctgctcgcgcctgcgccgcccgccggcctcaggaacgcgccctcttcgccggcgcgcgccctcgcagtcaccgccacccaccagctccggcaccaacagcagcgccgctgccaccgcccaccttctgccgccgccaccacagccaccttctcctcctccgctgtcctctcccgtcctcgcctctgtcgactatcaggtgaactttgaaccaggatggctgagccccgccaggagttcgaagtgatggaagatcacgctgggacgtacgggttgggggacaggaaagatcaggggggctacaccatgcaccaagaccaagagggtgacacggacgctggcctgaaagctgaagaagcaggcattggagacacccccagcctggaagacgaagctgctggtcacgtgacccaagctcgcatggtcagtaaaagcaaagacgggactggaagcgatgacaaaaaagccaagggggctgatggtaaaacgaagatcgccacaccgcggggagcagcccctccaggccagaagggccaggccaacgccaccaggattccagcaaaaaccccgcccgctccaaagacaccacccagctctggtgaacctccaaaatcaggggatcgcagcggctacagcagccccggctccccaggcactcccggcagccgctcccgcaccccgtcccttccaaccccacccacccgggagcccaagaaggtggcagtggtccgtactccacccaagtcgccgtcttccgccaagagccgcctgcagacagcccccgtgcccatgccagacctgaagaatgtcaagtccaagatcggctccactgagaacctgaagcaccagccgggaggcgggaaggtgcagataattaataagaagctggatcttagcaacgtccagtccaagtgtggctcaaaggataatatcaaacacgtcccgggaggcggcagtgtgcaaatagtctacaaaccagttgacctgagcaaggtgacctccaagtgtggctcattaggcaacatccatcataaaccaggaggtggccaggtggaagtaaaatctgagaagcttgacttcaaggacagagtccagtcgaagattgggtccctggacaatatcacccacgtccctggcggaggaaataaaaagattgaaacccacaagctgaccttccgcgagaacgccaaagccaagacagaccacggggcggagatcgtgtacaagtcgccagtggtgtctggggacacgtctccacggcatctcagcaatgtctcctccaccggcagcatcgacatggtagactcgccccagctcgccacgctagctgacgaggtgtctgcctccctggccaagcagggtttgtgatcaggcccctggggcggtcaataattgtggagaggagagaatgagagagtgtggaaaaaaaaagaataatgacccggcccccgccctctgcccccagctgctcctcgcagttcggttaattggttaatcacttaacctgcttttgtcactcggctttggctcgggacttcaaaatcagtgatgggagtaagagcaaatttcatctttccaaattgatgggtgggctagtaataaaatatttaaaaaaaaacattcaaaaacatggccacatccaacatttcctcaggcaattccttttgattcttttttcttccccctccatgtagaagagggagaaggagaggctctgaaagctgcttctgggggatttcaagggactgggggtgccaaccacctctggccctgttgtgggggtgtcacagaggcagtggcagcaacaaaggatttgaaacttggtgtgttcgtggagccacaggcagacgatgtcaaccttgtgtgagtgtgacgggggttggggtggggcgggaggccacgggggaggccgaggcaggggctgggcagaggggagaggaagcacaagaagtgggagtgggagaggaagccacgtgctggagagtagacatccccctccttgccgctgggagagccaaggcctatgccacctgcagcgtctgagcggccgcctgtccttggtggccgggggtgggggcctgctgtgggtcagtgtgccaccctctgcagggcagcctgtgggagaagggacagcgggtaaaaagagaaggcaagctggcaggagggtggcacttcgtggatgacctccttagaaaagactgaccttgatgtcttgagagcgctggcctcttcctccctccctgcagggtagggggcctgagttgaggggcttccctctgctccacagaaaccctgttttattgagttctgaaggttggaactgctgccatgattttggccactttgcagacctgggactttagggctaaccagttctctttgtaaggacttgtgcctcttgggagacgtccacccgtttccaagcctgggccactggcatctctggagtgtgtgggggtctgggaggcaggtcccgagccccctgtccttcccacggccactgcagtcaccccgtctgcgccgctgtgctgttgtctgccgtgagagcccaatcactgcctatacccctcatcacacgtcacaatgtcccgaattcccagcctcaccaccccttctcagtaatgaccctggttggttgcaggaggtacctactccatactgagggtgaaattaagggaaggcaaagtccaggcacaagagtgggaccccagcctctcactctcagttccactcatccaactgggaccctcaccacgaatctcatgatctgattcggttccctgtctcctcctcccgtcacagatgtgagccagggcactgctcagctgtgaccctaggtgtttctgccttgttgacatggagagagccctttcccctgagaaggcctggccccttcctgtgctgagcccacagcagcaggctgggtgtcttggttgtcagtggtggcaccaggatggaagggcaaggcacccagggcaggcccacagtcccgctgtcccccacttgcaccctagcttgtagctgccaacctcccagacagcccagcccgctgctcagctccacatgcatagtatcagccctccacacccgacaaaggggaacacacccccttggaaatggttcttttcccccagtcccagctggaagccatgctgtctgttctgctggagcagctgaacatatacatagatgttgccctgccctccccatctgcaccctgttgagttgtagttggatttgtctgtttatgcttggattcaccagagtgactatgatagtgaaaagaaaaaaaaaaaaaaaaaaggacgcatgtatcttgaaatgcttgtaaagaggtttctaacccaccctcacgaggtgtctctcacccccacactgggactcgtgtggcctgtgtggtgccaccctgctggggcctcccaagttttgaaaggctttcctcagcacctgggacccaacagagaccagcttctagcagctaaggaggccgttcagctgtgacgaaggcctgaagcacaggattaggactgaagcgatgatgtccccttccctacttccccttggggctccctgtgtcagggcacagactaggtcttgtggctggtctggcttgcggcgcgaggatggttctctctggtcatagcccgaagtctcatggcagtcccaaaggaggcttacaactcctgcatcacaagaaaaaggaagccactgccagctggggggatctgcagctcccagaagctccgtgagcctcagccacccctcagactgggttcctctccaagctcgccctctggaggggcagcgcagcctcccaccaagggccctgcgaccacagcagggattgggatgaattgcctgtcctggatctgctctagaggcccaagctgcctgcctgaggaaggatgacttgacaagtcaggagacactgttcccaaagccttgaccagagcacctcagcccgctgaccttgcacaaactccatctgctgccatgagaaaagggaagccgcctttgcaaaacattgctgcctaaagaaactcagcagcctcaggcccaattctgccacttctggtttgggtacagttaaaggcaaccctgagggacttggcagtagaaatccagggcctcccctggggctggcagcttcgtgtgcagctagagctttacctgaaaggaagtctctgggcccagaactctccaccaagagcctccctgccgttcgctgagtcccagcaattctcctaagttgaagggatctgagaaggagaaggaaatgtggggtagatttggtggtggttagagatatgcccccctcattactgccaacagtttcggctgcatttcttcacgcacctcggttcctcttcctgaagttcttgtgccctgctcttcagcaccatgggccttcttatacggaaggctctgggatctcccccttgtggggcaggctcttggggccagcctaagatcatggtttagggtgatcagtgctggcagataaattgaaaaggcacgctggcttgtgatcttaaatgaggacaatccccccagggctgggcactcctcccctcccctcacttctcccacctgcagagccagtgtccttgggtgggctagataggatatactgtatgccggctccttcaagctgctgactcactttatcaatagttccatttaaattgacttcagtggtgagactgtatcctgtttgctattgcttgttgtgctatggggggaggggggaggaatgtgtaagatagttaacatgggcaaagggagatcttggggtgcagcacttaaactgcctcgtaacccttttcatgatttcaaccacatttgctagagggagggagcagccacggagttagaggcccttggggtttctcttttccactgacaggctttcccaggcagctggctagttcattccctccccagccaggtgcaggcgtaggaatatggacatctggttgctttggcctgctgccctctttcaggggtcctaagcccacaatcatgcctccctaagaccttggcatccttccctctaagccgttggcacctctgtgccacctctcacactggctccagacacacagcctgtgcttttggagctgagatcactcgcttcaccctcctcatctttgttctccaagtaaagccacgaggtcggggcgagggcagaggtgatcacctgcgtgtcccatctacagacctgcagcttcataaaacttctgatttctcttcagctttgaaaagggttaccctgggcactggcctagagcctcacctcctaatagacttagccccatgagtttgccatgttgagcaggactatttctggcacttgcaagtcccatgatttcttcggtaattctgagggtggggggagggacatgaaatcatcttagcttagctttctgtctgtgaatgtctatatagtgtattgtgtgttttaacaaatgatttacactgactgttgctgtaaaagtgaatttggaaataaagttattactctgattaaa

SEQ ID NO: 1767 - DNA, 5544 bp, Homo sapiens
ggacggccgagcggcagggcgctcgcgcgcgcccactagtggccggaggagaaggctcccgcggaggccgcgctgcccgccccctcccctggggaggctcgcgttcccgctgctcgcgcctgcgccgcccgccggcctcaggaacgcgccctcttcgccggcgcgcgccctcgcagtcaccgccacccaccagctccggcaccaacagcagcgccgctgccaccgcccaccttctgccgccgccaccacagccaccttctcctcctccgctgtcctctcccgtcctcgcctctgtcgactatcaggtgaactttgaaccaggatggctgagccccgccaggagttcgaagtgatggaagatcacgctgggacgtacgggttgggggacaggaaagatcaggggggctacaccatgcaccaagaccaagagggtgacacggacgctggcctgaaagctgaagaagcaggcattggagacacccccagcctggaagacgaagctgctggtcacgtgacccaagctcgcatggtcagtaaaagcaaagacgggactggaagcgatgacaaaaaagccaagggggctgatggtaaaacgaagatcgccacaccgcggggagcagcccctccaggccagaagggccaggccaacgccaccaggattccagcaaaaaccccgcccgctccaaagacaccacccagctctggtgaacctccaaaatcaggggatcgcagcggctacagcagccccggctccccaggcactcccggcagccgctcccgcaccccgtcccttccaaccccacccacccgggagcccaagaaggtggcagtggtccgtactccacccaagtcgccgtcttccgccaagagccgcctgcagacagcccccgtgcccatgccagacctgaagaatgtcaagtccaagatcggctccactgagaacctgaagcaccagccgggaggcgggaaggtgcaaatagtctacaaaccagttgacctgagcaaggtgacctccaagtgtggctcattaggcaacatccatcataaaccaggaggtggccaggtggaagtaaaatctgagaagcttgacttcaaggacagagtccagtcgaagattgggtccctggacaatatcacccacgtccctggcggaggaaataaaaagattgaaacccacaagctgaccttccgcgagaacgccaaagccaagacagaccacggggcggagatcgtgtacaagtcgccagtggtgtctggggacacgtctccacggcatctcagcaatgtctcctccaccggcagcatcgacatggtagactcgccccagctcgccacgctagctgacgaggtgtctgcctccctggccaagcagggtttgtgatcaggcccctggggcggtcaataattgtggagaggagagaatgagagagtgtggaaaaaaaaagaataatgacccggcccccgccctctgcccccagctgctcctcgcagttcggttaattggttaatcacttaacctgcttttgtcactcggctttggctcgggacttcaaaatcagtgatgggagtaagagcaaatttcatctttccaaattgatgggtgggctagtaataaaatatttaaaaaaaaacattcaaaaacatggccacatccaacatttcctcaggcaattccttttgattcttttttcttccccctccatgtagaagagggagaaggagaggctctgaaagctgcttctgggggatttcaagggactgggggtgccaaccacctctggccctgttgtgggggtgtcacagaggcagtggcagcaacaaaggatttgaaacttggtgtgttcgtggagccacaggcagacgatgtcaaccttgtgtgagtgtgacgggggttggggtggggcgggaggccacgggggaggccgaggcaggggctgggcagaggggagaggaagcacaagaagtgggagtgggagaggaagccacgtgctggagagtagacatccccctccttgccgctgggagagccaaggcctatgccacctgcagcgtctgagcggccgcctgtccttggtggccgggggtgggggcctgctgtgggtcagtgtgccaccctctgcagggcagcctgtgggagaagggacagcgggtaaaaagagaaggcaagctggcaggagggtggcacttcgtggatgacctccttagaaaagactgaccttgatgtcttgagagcgctggcctcttcctccctccctgcagggtagggggcctgagttgaggggcttccctctgctccacagaaaccctgttttattgagttctgaaggttggaactgctgccatgattttggccactttgcagacctgggactttagggctaaccagttctctttgtaaggacttgtgcctcttgggagacgtccacccgtttccaagcctgggccactggcatctctggagtgtgtgggggtctgggaggcaggtcccgagccccctgtccttcccacggccactgcagtcaccccgtctgcgccgctgtgctgttgtctgccgtgagagcccaatcactgcctatacccctcatcacacgtcacaatgtcccgaattcccagcctcaccaccccttctcagtaatgaccctggttggttgcaggaggtacctactccatactgagggtgaaattaagggaaggcaaagtccaggcacaagagtgggaccccagcctctcactctcagttccactcatccaactgggaccctcaccacgaatctcatgatctgattcggttccctgtctcctcctcccgtcacagatgtgagccagggcactgctcagctgtgaccctaggtgtttctgccttgttgacatggagagagccctttcccctgagaaggcctggccccttcctgtgctgagcccacagcagcaggctgggtgtcttggttgtcagtggtggcaccaggatggaagggcaaggcacccagggcaggcccacagtcccgctgtcccccacttgcaccctagcttgtagctgccaacctcccagacagcccagcccgctgctcagctccacatgcatagtatcagccctccacacccgacaaaggggaacacacccccttggaaatggttcttttcccccagtcccagctggaagccatgctgtctgttctgctggagcagctgaacatatacatagatgttgccctgccctccccatctgcaccctgttgagttgtagttggatttgtctgtttatgcttggattcaccagagtgactatgatagtgaaaagaaaaaaaaaaaaaaaaaaggacgcatgtatcttgaaatgcttgtaaagaggtttctaacccaccctcacgaggtgtctctcacccccacactgggactcgtgtggcctgtgtggtgccaccctgctggggcctcccaagttttgaaaggctttcctcagcacctgggacccaacagagaccagcttctagcagctaaggaggccgttcagctgtgacgaaggcctgaagcacaggattaggactgaagcgatgatgtccccttccctacttccccttggggctccctgtgtcagggcacagactaggtcttgtggctggtctggcttgcggcgcgaggatggttctctctggtcatagcccgaagtctcatggcagtcccaaaggaggcttacaactcctgcatcacaagaaaaaggaagccactgccagctggggggatctgcagctcccagaagctccgtgagcctcagccacccctcagactgggttcctctccaagctcgccctctggaggggcagcgcagcctcccaccaagggccctgcgaccacagcagggattgggatgaattgcctgtcctggatctgctctagaggcccaagctgcctgcctgaggaaggatgacttgacaagtcaggagacactgttcccaaagccttgaccagagcacctcagcccgctgaccttgcacaaactccatctgctgccatgagaaaagggaagccgcctttgcaaaacattgctgcctaaagaaactcagcagcctcaggcccaattctgccacttctggtttgggtacagttaaaggcaaccctgagggacttggcagtagaaatccagggcctcccctggggctggcagcttcgtgtgcagctagagctttacctgaaaggaagtctctgggcccagaactctccaccaagagcctccctgccgttcgctgagtcccagcaattctcctaagttgaagggatctgagaaggagaaggaaatgtggggtagatttggtggtggttagagatatgcccccctcattactgccaacagtttcggctgcatttcttcacgcacctcggttcctcttcctgaagttcttgtgccctgctcttcagcaccatgggccttcttatacggaaggctctgggatctcccccttgtggggcaggctcttggggccagcctaagatcatggtttagggtgatcagtgctggcagataaattgaaaaggcacgctggcttgtgatcttaaatgaggacaatccccccagggctgggcactcctcccctcccctcacttctcccacctgcagagccagtgtccttgggtgggctagataggatatactgtatgccggctccttcaagctgctgactcactttatcaatagttccatttaaattgacttcagtggtgagactgtatcctgtttgctattgcttgttgtgctatggggggaggggggaggaatgtgtaagatagttaacatgggcaaagggagatcttggggtgcagcacttaaactgcctcgtaacccttttcatgatttcaaccacatttgctagagggagggagcagccacggagttagaggcccttggggtttctcttttccactgacaggctttcccaggcagctggctagttcattccctccccagccaggtgcaggcgtaggaatatggacatctggttgctttggcctgctgccctctttcaggggtcctaagcccacaatcatgcctccctaagaccttggcatccttccctctaagccgttggcacctctgtgccacctctcacactggctccagacacacagcctgtgcttttggagctgagatcactcgcttcaccctcctcatctttgttctccaagtaaagccacgaggtcggggcgagggcagaggtgatcacctgcgtgtcccatctacagacctgcagcttcataaaacttctgatttctcttcagctttgaaaagggttaccctgggcactggcctagagcctcacctcctaatagacttagccccatgagtttgccatgttgagcaggactatttctggcacttgcaagtcccatgatttcttcggtaattctgagggtggggggagggacatgaaatcatcttagcttagctttctgtctgtgaatgtctatatagtgtattgtgtgttttaacaaatgatttacactgactgttgctgtaaaagtgaatttggaaataaagttattactctgattaaa

SEQ ID NO: 1768 - DNA, 5724 bp, Homo sapiens
ggacggccgagcggcagggcgctcgcgcgcgcccactagtggccggaggagaaggctcccgcggaggccgcgctgcccgccccctcccctggggaggctcgcgttcccgctgctcgcgcctgcgccgcccgccggcctcaggaacgcgccctcttcgccggcgcgcgccctcgcagtcaccgccacccaccagctccggcaccaacagcagcgccgctgccaccgcccaccttctgccgccgccaccacagccaccttctcctcctccgctgtcctctcccgtcctcgcctctgtcgactatcaggtgaactttgaaccaggatggctgagccccgccaggagttcgaagtgatggaagatcacgctgggacgtacgggttgggggacaggaaagatcaggggggctacaccatgcaccaagaccaagagggtgacacggacgctggcctgaaagaatctcccctgcagacccccactgaggacggatctgaggaaccgggctctgaaacctctgatgctaagagcactccaacagcggaagctgaagaagcaggcattggagacacccccagcctggaagacgaagctgctggtcacgtgacccaagctcgcatggtcagtaaaagcaaagacgggactggaagcgatgacaaaaaagccaagggggctgatggtaaaacgaagatcgccacaccgcggggagcagcccctccaggccagaagggccaggccaacgccaccaggattccagcaaaaaccccgcccgctccaaagacaccacccagctctggtgaacctccaaaatcaggggatcgcagcggctacagcagccccggctccccaggcactcccggcagccgctcccgcaccccgtcccttccaaccccacccacccgggagcccaagaaggtggcagtggtccgtactccacccaagtcgccgtcttccgccaagagccgcctgcagacagcccccgtgcccatgccagacctgaagaatgtcaagtccaagatcggctccactgagaacctgaagcaccagccgggaggcgggaaggtgcagataattaataagaagctggatcttagcaacgtccagtccaagtgtggctcaaaggataatatcaaacacgtcccgggaggcggcagtgtgcaaatagtctacaaaccagttgacctgagcaaggtgacctccaagtgtggctcattaggcaacatccatcataaaccaggaggtggccaggtggaagtaaaatctgagaagcttgacttcaaggacagagtccagtcgaagattgggtccctggacaatatcacccacgtccctggcggaggaaataaaaagattgaaacccacaagctgaccttccgcgagaacgccaaagccaagacagaccacggggcggagatcgtgtacaagtcgccagtggtgtctggggacacgtctccacggcatctcagcaatgtctcctccaccggcagcatcgacatggtagactcgccccagctcgccacgctagctgacgaggtgtctgcctccctggccaagcagggtttgtgatcaggcccctggggcggtcaataattgtggagaggagagaatgagagagtgtggaaaaaaaaagaataatgacccggcccccgccctctgcccccagctgctcctcgcagttcggttaattggttaatcacttaacctgcttttgtcactcggctttggctcgggacttcaaaatcagtgatgggagtaagagcaaatttcatctttccaaattgatgggtgggctagtaataaaatatttaaaaaaaaacattcaaaaacatggccacatccaacatttcctcaggcaattccttttgattcttttttcttccccctccatgtagaagagggagaaggagaggctctgaaagctgcttctgggggatttcaagggactgggggtgccaaccacctctggccctgttgtgggggtgtcacagaggcagtggcagcaacaaaggatttgaaacttggtgtgttcgtggagccacaggcagacgatgtcaaccttgtgtgagtgtgacgggggttggggtggggcgggaggccacgggggaggccgaggcaggggctgggcagaggggagaggaagcacaagaagtgggagtgggagaggaagccacgtgctggagagtagacatccccctccttgccgctgggagagccaaggcctatgccacctgcagcgtctgagcggccgcctgtccttggtggccgggggtgggggcctgctgtgggtcagtgtgccaccctctgcagggcagcctgtgggagaagggacagcgggtaaaaagagaaggcaagctggcaggagggtggcacttcgtggatgacctccttagaaaagactgaccttgatgtcttgagagcgctggcctcttcctccctccctgcagggtagggggcctgagttgaggggcttccctctgctccacagaaaccctgttttattgagttctgaaggttggaactgctgccatgattttggccactttgcagacctgggactttagggctaaccagttctctttgtaaggacttgtgcctcttgggagacgtccacccgtttccaagcctgggccactggcatctctggagtgtgtgggggtctgggaggcaggtcccgagccccctgtccttcccacggccactgcagtcaccccgtctgcgccgctgtgctgttgtctgccgtgagagcccaatcactgcctatacccctcatcacacgtcacaatgtcccgaattcccagcctcaccaccccttctcagtaatgaccctggttggttgcaggaggtacctactccatactgagggtgaaattaagggaaggcaaagtccaggcacaagagtgggaccccagcctctcactctcagttccactcatccaactgggaccctcaccacgaatctcatgatctgattcggttccctgtctcctcctcccgtcacagatgtgagccagggcactgctcagctgtgaccctaggtgtttctgccttgttgacatggagagagccctttcccctgagaaggcctggccccttcctgtgctgagcccacagcagcaggctgggtgtcttggttgtcagtggtggcaccaggatggaagggcaaggcacccagggcaggcccacagtcccgctgtcccccacttgcaccctagcttgtagctgccaacctcccagacagcccagcccgctgctcagctccacatgcatagtatcagccctccacacccgacaaaggggaacacacccccttggaaatggttcttttcccccagtcccagctggaagccatgctgtctgttctgctggagcagctgaacatatacatagatgttgccctgccctccccatctgcaccctgttgagttgtagttggatttgtctgtttatgcttggattcaccagagtgactatgatagtgaaaagaaaaaaaaaaaaaaaaaaggacgcatgtatcttgaaatgcttgtaaagaggtttctaacccaccctcacgaggtgtctctcacccccacactgggactcgtgtggcctgtgtggtgccaccctgctggggcctcccaagttttgaaaggctttcctcagcacctgggacccaacagagaccagcttctagcagctaaggaggccgttcagctgtgacgaaggcctgaagcacaggattaggactgaagcgatgatgtccccttccctacttccccttggggctccctgtgtcagggcacagactaggtcttgtggctggtctggcttgcggcgcgaggatggttctctctggtcatagcccgaagtctcatggcagtcccaaaggaggcttacaactcctgcatcacaagaaaaaggaagccactgccagctggggggatctgcagctcccagaagctccgtgagcctcagccacccctcagactgggttcctctccaagctcgccctctggaggggcagcgcagcctcccaccaagggccctgcgaccacagcagggattgggatgaattgcctgtcctggatctgctctagaggcccaagctgcctgcctgaggaaggatgacttgacaagtcaggagacactgttcccaaagccttgaccagagcacctcagcccgctgaccttgcacaaactccatctgctgccatgagaaaagggaagccgcctttgcaaaacattgctgcctaaagaaactcagcagcctcaggcccaattctgccacttctggtttgggtacagttaaaggcaaccctgagggacttggcagtagaaatccagggcctcccctggggctggcagcttcgtgtgcagctagagctttacctgaaaggaagtctctgggcccagaactctccaccaagagcctccctgccgttcgctgagtcccagcaattctcctaagttgaagggatctgagaaggagaaggaaatgtggggtagatttggtggtggttagagatatgcccccctcattactgccaacagtttcggctgcatttcttcacgcacctcggttcctcttcctgaagttcttgtgccctgctcttcagcaccatgggccttcttatacggaaggctctgggatctcccccttgtggggcaggctcttggggccagcctaagatcatggtttagggtgatcagtgctggcagataaattgaaaaggcacgctggcttgtgatcttaaatgaggacaatccccccagggctgggcactcctcccctcccctcacttctcccacctgcagagccagtgtccttgggtgggctagataggatatactgtatgccggctccttcaagctgctgactcactttatcaatagttccatttaaattgacttcagtggtgagactgtatcctgtttgctattgcttgttgtgctatggggggaggggggaggaatgtgtaagatagttaacatgggcaaagggagatcttggggtgcagcacttaaactgcctcgtaacccttttcatgatttcaaccacatttgctagagggagggagcagccacggagttagaggcccttggggtttctcttttccactgacaggctttcccaggcagctggctagttcattccctccccagccaggtgcaggcgtaggaatatggacatctggttgctttggcctgctgccctctttcaggggtcctaagcccacaatcatgcctccctaagaccttggcatccttccctctaagccgttggcacctctgtgccacctctcacactggctccagacacacagcctgtgcttttggagctgagatcactcgcttcaccctcctcatctttgttctccaagtaaagccacgaggtcggggcgagggcagaggtgatcacctgcgtgtcccatctacagacctgcagcttcataaaacttctgatttctcttcagctttgaaaagggttaccctgggcactggcctagagcctcacctcctaatagacttagccccatgagtttgccatgttgagcaggactatttctggcacttgcaagtcccatgatttcttcggtaattctgagggtggggggagggacatgaaatcatcttagcttagctttctgtctgtgaatgtctatatagtgtattgtgtgttttaacaaatgatttacactgactgttgctgtaaaagtgaatttggaaataaagttattactctgattaaa

SEQ ID NO: 1769 - DNA, 6816 bp, Homo sapiens
ggacggccgagcggcagggcgctcgcgcgcgcccactagtggccggaggagaaggctcccgcggaggccgcgctgcccgccccctcccctggggaggctcgcgttcccgctgctcgcgcctgcgccgcccgccggcctcaggaacgcgccctcttcgccggcgcgcgccctcgcagtcaccgccacccaccagctccggcaccaacagcagcgccgctgccaccgcccaccttctgccgccgccaccacagccaccttctcctcctccgctgtcctctcccgtcctcgcctctgtcgactatcaggtgaactttgaaccaggatggctgagccccgccaggagttcgaagtgatggaagatcacgctgggacgtacgggttgggggacaggaaagatcaggggggctacaccatgcaccaagaccaagagggtgacacggacgctggcctgaaagaatctcccctgcagacccccactgaggacggatctgaggaaccgggctctgaaacctctgatgctaagagcactccaacagcggaagatgtgacagcacccttagtggatgagggagctcccggcaagcaggctgccgcgcagccccacacggagatcccagaaggaaccacagctgaagaagcaggcattggagacacccccagcctggaagacgaagctgctggtcacgtgacccaagagcctgaaagtggtaaggtggtccaggaaggcttcctccgagagccaggccccccaggtctgagccaccagctcatgtccggcatgcctggggctcccctcctgcctgagggccccagagaggccacacgccaaccttcggggacaggacctgaggacacagagggcggccgccacgcccctgagctgctcaagcaccagcttctaggagacctgcaccaggaggggccgccgctgaagggggcagggggcaaagagaggccggggagcaaggaggaggtggatgaagaccgcgacgtcgatgagtcctccccccaagactcccctccctccaaggcctccccagcccaagatgggcggcctccccagacagccgccagagaagccaccagcatcccaggcttcccagcggagggtgccatccccctccctgtggatttcctctccaaagtttccacagagatcccagcctcagagcccgacgggcccagtgtagggcgggccaaagggcaggatgcccccctggagttcacgtttcacgtggaaatcacacccaacgtgcagaaggagcaggcgcactcggaggagcatttgggaagggctgcatttccaggggcccctggagaggggccagaggcccggggcccctctttgggagaggacacaaaagaggctgaccttccagagccctctgaaaagcagcctgctgctgctccgcgggggaagcccgtcagccgggtccctcaactcaaagctcgcatggtcagtaaaagcaaagacgggactggaagcgatgacaaaaaagccaagacatccacacgttcctctgctaaaaccttgaaaaataggccttgccttagccccaaacaccccactcctggtagctcagaccctctgatccaaccctccagccctgctgtgtgcccagagccaccttcctctcctaaatacgtctcttctgtcacttcccgaactggcagttctggagcaaaggagatgaaactcaagggggctgatggtaaaacgaagatcgccacaccgcggggagcagcccctccaggccagaagggccaggccaacgccaccaggattccagcaaaaaccccgcccgctccaaagacaccacccagctctgcgactaagcaagtccagagaagaccaccccctgcagggcccagatctgagagaggtgaacctccaaaatcaggggatcgcagcggctacagcagccccggctccccaggcactcccggcagccgctcccgcaccccgtcccttccaaccccacccacccgggagcccaagaaggtggcagtggtccgtactccacccaagtcgccgtcttccgccaagagccgcctgcagacagcccccgtgcccatgccagacctgaagaatgtcaagtccaagatcggctccactgagaacctgaagcaccagccgggaggcgggaaggtgcagataattaataagaagctggatcttagcaacgtccagtccaagtgtggctcaaaggataatatcaaacacgtcccgggaggcggcagtgtgcaaatagtctacaaaccagttgacctgagcaaggtgacctccaagtgtggctcattaggcaacatccatcataaaccaggaggtggccaggtggaagtaaaatctgagaagcttgacttcaaggacagagtccagtcgaagattgggtccctggacaatatcacccacgtccctggcggaggaaataaaaagattgaaacccacaagctgaccttccgcgagaacgccaaagccaagacagaccacggggcggagatcgtgtacaagtcgccagtggtgtctggggacacgtctccacggcatctcagcaatgtctcctccaccggcagcatcgacatggtagactcgccccagctcgccacgctagctgacgaggtgtctgcctccctggccaagcagggtttgtgatcaggcccctggggcggtcaataattgtggagaggagagaatgagagagtgtggaaaaaaaaagaataatgacccggcccccgccctctgcccccagctgctcctcgcagttcggttaattggttaatcacttaacctgcttttgtcactcggctttggctcgggacttcaaaatcagtgatgggagtaagagcaaatttcatctttccaaattgatgggtgggctagtaataaaatatttaaaaaaaaacattcaaaaacatggccacatccaacatttcctcaggcaattccttttgattcttttttcttccccctccatgtagaagagggagaaggagaggctctgaaagctgcttctgggggatttcaagggactgggggtgccaaccacctctggccctgttgtgggggtgtcacagaggcagtggcagcaacaaaggatttgaaacttggtgtgttcgtggagccacaggcagacgatgtcaaccttgtgtgagtgtgacgggggttggggtggggcgggaggccacgggggaggccgaggcaggggctgggcagaggggagaggaagcacaagaagtgggagtgggagaggaagccacgtgctggagagtagacatccccctccttgccgctgggagagccaaggcctatgccacctgcagcgtctgagcggccgcctgtccttggtggccgggggtgggggcctgctgtgggtcagtgtgccaccctctgcagggcagcctgtgggagaagggacagcgggtaaaaagagaaggcaagctggcaggagggtggcacttcgtggatgacctccttagaaaagactgaccttgatgtcttgagagcgctggcctcttcctccctccctgcagggtagggggcctgagttgaggggcttccctctgctccacagaaaccctgttttattgagttctgaaggttggaactgctgccatgattttggccactttgcagacctgggactttagggctaaccagttctctttgtaaggacttgtgcctcttgggagacgtccacccgtttccaagcctgggccactggcatctctggagtgtgtgggggtctgggaggcaggtcccgagccccctgtccttcccacggccactgcagtcaccccgtctgcgccgctgtgctgttgtctgccgtgagagcccaatcactgcctatacccctcatcacacgtcacaatgtcccgaattcccagcctcaccaccccttctcagtaatgaccctggttggttgcaggaggtacctactccatactgagggtgaaattaagggaaggcaaagtccaggcacaagagtgggaccccagcctctcactctcagttccactcatccaactgggaccctcaccacgaatctcatgatctgattcggttccctgtctcctcctcccgtcacagatgtgagccagggcactgctcagctgtgaccctaggtgtttctgccttgttgacatggagagagccctttcccctgagaaggcctggccccttcctgtgctgagcccacagcagcaggctgggtgtcttggttgtcagtggtggcaccaggatggaagggcaaggcacccagggcaggcccacagtcccgctgtcccccacttgcaccctagcttgtagctgccaacctcccagacagcccagcccgctgctcagctccacatgcatagtatcagccctccacacccgacaaaggggaacacacccccttggaaatggttcttttcccccagtcccagctggaagccatgctgtctgttctgctggagcagctgaacatatacatagatgttgccctgccctccccatctgcaccctgttgagttgtagttggatttgtctgtttatgcttggattcaccagagtgactatgatagtgaaaagaaaaaaaaaaaaaaaaaaggacgcatgtatcttgaaatgcttgtaaagaggtttctaacccaccctcacgaggtgtctctcacccccacactgggactcgtgtggcctgtgtggtgccaccctgctggggcctcccaagttttgaaaggctttcctcagcacctgggacccaacagagaccagcttctagcagctaaggaggccgttcagctgtgacgaaggcctgaagcacaggattaggactgaagcgatgatgtccccttccctacttccccttggggctccctgtgtcagggcacagactaggtcttgtggctggtctggcttgcggcgcgaggatggttctctctggtcatagcccgaagtctcatggcagtcccaaaggaggcttacaactcctgcatcacaagaaaaaggaagccactgccagctggggggatctgcagctcccagaagctccgtgagcctcagccacccctcagactgggttcctctccaagctcgccctctggaggggcagcgcagcctcccaccaagggccctgcgaccacagcagggattgggatgaattgcctgtcctggatctgctctagaggcccaagctgcctgcctgaggaaggatgacttgacaagtcaggagacactgttcccaaagccttgaccagagcacctcagcccgctgaccttgcacaaactccatctgctgccatgagaaaagggaagccgcctttgcaaaacattgctgcctaaagaaactcagcagcctcaggcccaattctgccacttctggtttgggtacagttaaaggcaaccctgagggacttggcagtagaaatccagggcctcccctggggctggcagcttcgtgtgcagctagagctttacctgaaaggaagtctctgggcccagaactctccaccaagagcctccctgccgttcgctgagtcccagcaattctcctaagttgaagggatctgagaaggagaaggaaatgtggggtagatttggtggtggttagagatatgcccccctcattactgccaacagtttcggctgcatttcttcacgcacctcggttcctcttcctgaagttcttgtgccctgctcttcagcaccatgggccttcttatacggaaggctctgggatctcccccttgtggggcaggctcttggggccagcctaagatcatggtttagggtgatcagtgctggcagataaattgaaaaggcacgctggcttgtgatcttaaatgaggacaatccccccagggctgggcactcctcccctcccctcacttctcccacctgcagagccagtgtccttgggtgggctagataggatatactgtatgccggctccttcaagctgctgactcactttatcaatagttccatttaaattgacttcagtggtgagactgtatcctgtttgctattgcttgttgtgctatggggggaggggggaggaatgtgtaagatagttaacatgggcaaagggagatcttggggtgcagcacttaaactgcctcgtaacccttttcatgatttcaaccacatttgctagagggagggagcagccacggagttagaggcccttggggtttctcttttccactgacaggctttcccaggcagctggctagttcattccctccccagccaggtgcaggcgtaggaatatggacatctggttgctttggcctgctgccctctttcaggggtcctaagcccacaatcatgcctccctaagaccttggcatccttccctctaagccgttggcacctctgtgccacctctcacactggctccagacacacagcctgtgcttttggagctgagatcactcgcttcaccctcctcatctttgttctccaagtaaagccacgaggtcggggcgagggcagaggtgatcacctgcgtgtcccatctacagacctgcagcttcataaaacttctgatttctcttcagctttgaaaagggttaccctgggcactggcctagagcctcacctcctaatagacttagccccatgagtttgccatgttgagcaggactatttctggcacttgcaagtcccatgatttcttcggtaattctgagggtggggggagggacatgaaatcatcttagcttagctttctgtctgtgaatgtctatatagtgtattgtgtgttttaacaaatgatttacactgactgttgctgtaaaagtgaatttggaaataaagttattactctgattaaa

SEQ ID NO: 1770 - DNA, 5631 bp, Homo sapiens
ggacggccgagcggcagggcgctcgcgcgcgcccactagtggccggaggagaaggctcccgcggaggccgcgctgcccgccccctcccctggggaggctcgcgttcccgctgctcgcgcctgcgccgcccgccggcctcaggaacgcgccctcttcgccggcgcgcgccctcgcagtcaccgccacccaccagctccggcaccaacagcagcgccgctgccaccgcccaccttctgccgccgccaccacagccaccttctcctcctccgctgtcctctcccgtcctcgcctctgtcgactatcaggtgaactttgaaccaggatggctgagccccgccaggagttcgaagtgatggaagatcacgctgggacgtacgggttgggggacaggaaagatcaggggggctacaccatgcaccaagaccaagagggtgacacggacgctggcctgaaagaatctcccctgcagacccccactgaggacggatctgaggaaccgggctctgaaacctctgatgctaagagcactccaacagcggaagctgaagaagcaggcattggagacacccccagcctggaagacgaagctgctggtcacgtgacccaagctcgcatggtcagtaaaagcaaagacgggactggaagcgatgacaaaaaagccaagggggctgatggtaaaacgaagatcgccacaccgcggggagcagcccctccaggccagaagggccaggccaacgccaccaggattccagcaaaaaccccgcccgctccaaagacaccacccagctctggtgaacctccaaaatcaggggatcgcagcggctacagcagccccggctccccaggcactcccggcagccgctcccgcaccccgtcccttccaaccccacccacccgggagcccaagaaggtggcagtggtccgtactccacccaagtcgccgtcttccgccaagagccgcctgcagacagcccccgtgcccatgccagacctgaagaatgtcaagtccaagatcggctccactgagaacctgaagcaccagccgggaggcgggaaggtgcaaatagtctacaaaccagttgacctgagcaaggtgacctccaagtgtggctcattaggcaacatccatcataaaccaggaggtggccaggtggaagtaaaatctgagaagcttgacttcaaggacagagtccagtcgaagattgggtccctggacaatatcacccacgtccctggcggaggaaataaaaagattgaaacccacaagctgaccttccgcgagaacgccaaagccaagacagaccacggggcggagatcgtgtacaagtcgccagtggtgtctggggacacgtctccacggcatctcagcaatgtctcctccaccggcagcatcgacatggtagactcgccccagctcgccacgctagctgacgaggtgtctgcctccctggccaagcagggtttgtgatcaggcccctggggcggtcaataattgtggagaggagagaatgagagagtgtggaaaaaaaaagaataatgacccggcccccgccctctgcccccagctgctcctcgcagttcggttaattggttaatcacttaacctgcttttgtcactcggctttggctcgggacttcaaaatcagtgatgggagtaagagcaaatttcatctttccaaattgatgggtgggctagtaataaaatatttaaaaaaaaacattcaaaaacatggccacatccaacatttcctcaggcaattccttttgattcttttttcttccccctccatgtagaagagggagaaggagaggctctgaaagctgcttctgggggatttcaagggactgggggtgccaaccacctctggccctgttgtgggggtgtcacagaggcagtggcagcaacaaaggatttgaaacttggtgtgttcgtggagccacaggcagacgatgtcaaccttgtgtgagtgtgacgggggttggggtggggcgggaggccacgggggaggccgaggcaggggctgggcagaggggagaggaagcacaagaagtgggagtgggagaggaagccacgtgctggagagtagacatccccctccttgccgctgggagagccaaggcctatgccacctgcagcgtctgagcggccgcctgtccttggtggccgggggtgggggcctgctgtgggtcagtgtgccaccctctgcagggcagcctgtgggagaagggacagcgggtaaaaagagaaggcaagctggcaggagggtggcacttcgtggatgacctccttagaaaagactgaccttgatgtcttgagagcgctggcctcttcctccctccctgcagggtagggggcctgagttgaggggcttccctctgctccacagaaaccctgttttattgagttctgaaggttggaactgctgccatgattttggccactttgcagacctgggactttagggctaaccagttctctttgtaaggacttgtgcctcttgggagacgtccacccgtttccaagcctgggccactggcatctctggagtgtgtgggggtctgggaggcaggtcccgagccccctgtccttcccacggccactgcagtcaccccgtctgcgccgctgtgctgttgtctgccgtgagagcccaatcactgcctatacccctcatcacacgtcacaatgtcccgaattcccagcctcaccaccccttctcagtaatgaccctggttggttgcaggaggtacctactccatactgagggtgaaattaagggaaggcaaagtccaggcacaagagtgggaccccagcctctcactctcagttccactcatccaactgggaccctcaccacgaatctcatgatctgattcggttccctgtctcctcctcccgtcacagatgtgagccagggcactgctcagctgtgaccctaggtgtttctgccttgttgacatggagagagccctttcccctgagaaggcctggccccttcctgtgctgagcccacagcagcaggctgggtgtcttggttgtcagtggtggcaccaggatggaagggcaaggcacccagggcaggcccacagtcccgctgtcccccacttgcaccctagcttgtagctgccaacctcccagacagcccagcccgctgctcagctccacatgcatagtatcagccctccacacccgacaaaggggaacacacccccttggaaatggttcttttcccccagtcccagctggaagccatgctgtctgttctgctggagcagctgaacatatacatagatgttgccctgccctccccatctgcaccctgttgagttgtagttggatttgtctgtttatgcttggattcaccagagtgactatgatagtgaaaagaaaaaaaaaaaaaaaaaaggacgcatgtatcttgaaatgcttgtaaagaggtttctaacccaccctcacgaggtgtctctcacccccacactgggactcgtgtggcctgtgtggtgccaccctgctggggcctcccaagttttgaaaggctttcctcagcacctgggacccaacagagaccagcttctagcagctaaggaggccgttcagctgtgacgaaggcctgaagcacaggattaggactgaagcgatgatgtccccttccctacttccccttggggctccctgtgtcagggcacagactaggtcttgtggctggtctggcttgcggcgcgaggatggttctctctggtcatagcccgaagtctcatggcagtcccaaaggaggcttacaactcctgcatcacaagaaaaaggaagccactgccagctggggggatctgcagctcccagaagctccgtgagcctcagccacccctcagactgggttcctctccaagctcgccctctggaggggcagcgcagcctcccaccaagggccctgcgaccacagcagggattgggatgaattgcctgtcctggatctgctctagaggcccaagctgcctgcctgaggaaggatgacttgacaagtcaggagacactgttcccaaagccttgaccagagcacctcagcccgctgaccttgcacaaactccatctgctgccatgagaaaagggaagccgcctttgcaaaacattgctgcctaaagaaactcagcagcctcaggcccaattctgccacttctggtttgggtacagttaaaggcaaccctgagggacttggcagtagaaatccagggcctcccctggggctggcagcttcgtgtgcagctagagctttacctgaaaggaagtctctgggcccagaactctccaccaagagcctccctgccgttcgctgagtcccagcaattctcctaagttgaagggatctgagaaggagaaggaaatgtggggtagatttggtggtggttagagatatgcccccctcattactgccaacagtttcggctgcatttcttcacgcacctcggttcctcttcctgaagttcttgtgccctgctcttcagcaccatgggccttcttatacggaaggctctgggatctcccccttgtggggcaggctcttggggccagcctaagatcatggtttagggtgatcagtgctggcagataaattgaaaaggcacgctggcttgtgatcttaaatgaggacaatccccccagggctgggcactcctcccctcccctcacttctcccacctgcagagccagtgtccttgggtgggctagataggatatactgtatgccggctccttcaagctgctgactcactttatcaatagttccatttaaattgacttcagtggtgagactgtatcctgtttgctattgcttgttgtgctatggggggaggggggaggaatgtgtaagatagttaacatgggcaaagggagatcttggggtgcagcacttaaactgcctcgtaacccttttcatgatttcaaccacatttgctagagggagggagcagccacggagttagaggcccttggggtttctcttttccactgacaggctttcccaggcagctggctagttcattccctccccagccaggtgcaggcgtaggaatatggacatctggttgctttggcctgctgccctctttcaggggtcctaagcccacaatcatgcctccctaagaccttggcatccttccctctaagccgttggcacctctgtgccacctctcacactggctccagacacacagcctgtgcttttggagctgagatcactcgcttcaccctcctcatctttgttctccaagtaaagccacgaggtcggggcgagggcagaggtgatcacctgcgtgtcccatctacagacctgcagcttcataaaacttctgatttctcttcagctttgaaaagggttaccctgggcactggcctagagcctcacctcctaatagacttagccccatgagtttgccatgttgagcaggactatttctggcacttgcaagtcccatgatttcttcggtaattctgagggtggggggagggacatgaaatcatcttagcttagctttctgtctgtgaatgtctatatagtgtattgtgtgttttaacaaatgatttacactgactgttgctgtaaaagtgaatttggaaataaagttattactctgattaaa

SEQ ID NO: 1771 - DNA, 5718 bp, Homo sapiens
ggacggccgagcggcagggcgctcgcgcgcgcccactagtggccggaggagaaggctcccgcggaggccgcgctgcccgccccctcccctggggaggctcgcgttcccgctgctcgcgcctgcgccgcccgccggcctcaggaacgcgccctcttcgccggcgcgcgccctcgcagtcaccgccacccaccagctccggcaccaacagcagcgccgctgccaccgcccaccttctgccgccgccaccacagccaccttctcctcctccgctgtcctctcccgtcctcgcctctgtcgactatcaggtgaactttgaaccaggatggctgagccccgccaggagttcgaagtgatggaagatcacgctgggacgtacgggttgggggacaggaaagatcaggggggctacaccatgcaccaagaccaagagggtgacacggacgctggcctgaaagaatctcccctgcagacccccactgaggacggatctgaggaaccgggctctgaaacctctgatgctaagagcactccaacagcggaagatgtgacagcacccttagtggatgagggagctcccggcaagcaggctgccgcgcagccccacacggagatcccagaaggaaccacagctgaagaagcaggcattggagacacccccagcctggaagacgaagctgctggtcacgtgacccaagctcgcatggtcagtaaaagcaaagacgggactggaagcgatgacaaaaaagccaagggggctgatggtaaaacgaagatcgccacaccgcggggagcagcccctccaggccagaagggccaggccaacgccaccaggattccagcaaaaaccccgcccgctccaaagacaccacccagctctggtgaacctccaaaatcaggggatcgcagcggctacagcagccccggctccccaggcactcccggcagccgctcccgcaccccgtcccttccaaccccacccacccgggagcccaagaaggtggcagtggtccgtactccacccaagtcgccgtcttccgccaagagccgcctgcagacagcccccgtgcccatgccagacctgaagaatgtcaagtccaagatcggctccactgagaacctgaagcaccagccgggaggcgggaaggtgcaaatagtctacaaaccagttgacctgagcaaggtgacctccaagtgtggctcattaggcaacatccatcataaaccaggaggtggccaggtggaagtaaaatctgagaagcttgacttcaaggacagagtccagtcgaagattgggtccctggacaatatcacccacgtccctggcggaggaaataaaaagattgaaacccacaagctgaccttccgcgagaacgccaaagccaagacagaccacggggcggagatcgtgtacaagtcgccagtggtgtctggggacacgtctccacggcatctcagcaatgtctcctccaccggcagcatcgacatggtagactcgccccagctcgccacgctagctgacgaggtgtctgcctccctggccaagcagggtttgtgatcaggcccctggggcggtcaataattgtggagaggagagaatgagagagtgtggaaaaaaaaagaataatgacccggcccccgccctctgcccccagctgctcctcgcagttcggttaattggttaatcacttaacctgcttttgtcactcggctttggctcgggacttcaaaatcagtgatgggagtaagagcaaatttcatctttccaaattgatgggtgggctagtaataaaatatttaaaaaaaaacattcaaaaacatggccacatccaacatttcctcaggcaattccttttgattcttttttcttccccctccatgtagaagagggagaaggagaggctctgaaagctgcttctgggggatttcaagggactgggggtgccaaccacctctggccctgttgtgggggtgtcacagaggcagtggcagcaacaaaggatttgaaacttggtgtgttcgtggagccacaggcagacgatgtcaaccttgtgtgagtgtgacgggggttggggtggggcgggaggccacgggggaggccgaggcaggggctgggcagaggggagaggaagcacaagaagtgggagtgggagaggaagccacgtgctggagagtagacatccccctccttgccgctgggagagccaaggcctatgccacctgcagcgtctgagcggccgcctgtccttggtggccgggggtgggggcctgctgtgggtcagtgtgccaccctctgcagggcagcctgtgggagaagggacagcgggtaaaaagagaaggcaagctggcaggagggtggcacttcgtggatgacctccttagaaaagactgaccttgatgtcttgagagcgctggcctcttcctccctccctgcagggtagggggcctgagttgaggggcttccctctgctccacagaaaccctgttttattgagttctgaaggttggaactgctgccatgattttggccactttgcagacctgggactttagggctaaccagttctctttgtaaggacttgtgcctcttgggagacgtccacccgtttccaagcctgggccactggcatctctggagtgtgtgggggtctgggaggcaggtcccgagccccctgtccttcccacggccactgcagtcaccccgtctgcgccgctgtgctgttgtctgccgtgagagcccaatcactgcctatacccctcatcacacgtcacaatgtcccgaattcccagcctcaccaccccttctcagtaatgaccctggttggttgcaggaggtacctactccatactgagggtgaaattaagggaaggcaaagtccaggcacaagagtgggaccccagcctctcactctcagttccactcatccaactgggaccctcaccacgaatctcatgatctgattcggttccctgtctcctcctcccgtcacagatgtgagccagggcactgctcagctgtgaccctaggtgtttctgccttgttgacatggagagagccctttcccctgagaaggcctggccccttcctgtgctgagcccacagcagcaggctgggtgtcttggttgtcagtggtggcaccaggatggaagggcaaggcacccagggcaggcccacagtcccgctgtcccccacttgcaccctagcttgtagctgccaacctcccagacagcccagcccgctgctcagctccacatgcatagtatcagccctccacacccgacaaaggggaacacacccccttggaaatggttcttttcccccagtcccagctggaagccatgctgtctgttctgctggagcagctgaacatatacatagatgttgccctgccctccccatctgcaccctgttgagttgtagttggatttgtctgtttatgcttggattcaccagagtgactatgatagtgaaaagaaaaaaaaaaaaaaaaaaggacgcatgtatcttgaaatgcttgtaaagaggtttctaacccaccctcacgaggtgtctctcacccccacactgggactcgtgtggcctgtgtggtgccaccctgctggggcctcccaagttttgaaaggctttcctcagcacctgggacccaacagagaccagcttctagcagctaaggaggccgttcagctgtgacgaaggcctgaagcacaggattaggactgaagcgatgatgtccccttccctacttccccttggggctccctgtgtcagggcacagactaggtcttgtggctggtctggcttgcggcgcgaggatggttctctctggtcatagcccgaagtctcatggcagtcccaaaggaggcttacaactcctgcatcacaagaaaaaggaagccactgccagctggggggatctgcagctcccagaagctccgtgagcctcagccacccctcagactgggttcctctccaagctcgccctctggaggggcagcgcagcctcccaccaagggccctgcgaccacagcagggattgggatgaattgcctgtcctggatctgctctagaggcccaagctgcctgcctgaggaaggatgacttgacaagtcaggagacactgttcccaaagccttgaccagagcacctcagcccgctgaccttgcacaaactccatctgctgccatgagaaaagggaagccgcctttgcaaaacattgctgcctaaagaaactcagcagcctcaggcccaattctgccacttctggtttgggtacagttaaaggcaaccctgagggacttggcagtagaaatccagggcctcccctggggctggcagcttcgtgtgcagctagagctttacctgaaaggaagtctctgggcccagaactctccaccaagagcctccctgccgttcgctgagtcccagcaattctcctaagttgaagggatctgagaaggagaaggaaatgtggggtagatttggtggtggttagagatatgcccccctcattactgccaacagtttcggctgcatttcttcacgcacctcggttcctcttcctgaagttcttgtgccctgctcttcagcaccatgggccttcttatacggaaggctctgggatctcccccttgtggggcaggctcttggggccagcctaagatcatggtttagggtgatcagtgctggcagataaattgaaaaggcacgctggcttgtgatcttaaatgaggacaatccccccagggctgggcactcctcccctcccctcacttctcccacctgcagagccagtgtccttgggtgggctagataggatatactgtatgccggctccttcaagctgctgactcactttatcaatagttccatttaaattgacttcagtggtgagactgtatcctgtttgctattgcttgttgtgctatggggggaggggggaggaatgtgtaagatagttaacatgggcaaagggagatcttggggtgcagcacttaaactgcctcgtaacccttttcatgatttcaaccacatttgctagagggagggagcagccacggagttagaggcccttggggtttctcttttccactgacaggctttcccaggcagctggctagttcattccctccccagccaggtgcaggcgtaggaatatggacatctggttgctttggcctgctgccctctttcaggggtcctaagcccacaatcatgcctccctaagaccttggcatccttccctctaagccgttggcacctctgtgccacctctcacactggctccagacacacagcctgtgcttttggagctgagatcactcgcttcaccctcctcatctttgttctccaagtaaagccacgaggtcggggcgagggcagaggtgatcacctgcgtgtcccatctacagacctgcagcttcataaaacttctgatttctcttcagctttgaaaagggttaccctgggcactggcctagagcctcacctcctaatagacttagccccatgagtttgccatgttgagcaggactatttctggcacttgcaagtcccatgatttcttcggtaattctgagggtggggggagggacatgaaatcatcttagcttagctttctgtctgtgaatgtctatatagtgtattgtgtgttttaacaaatgatttacactgactgttgctgtaaaagtgaatttggaaataaagttattactctgattaaa

SEQ ID NO: 1772 - RNA, 50 nt, Artificial Sequence
  Description of Artificial Sequence: Synthetic oligonucleotide
uuuaugccucauccucugagugcugaaggcuugcuguaggcuguaugcug

SEQ ID NO: 1773 - RNA, 54 nt, Artificial Sequence
  Description of Artificial Sequence: Synthetic oligonucleotide
gugcugggcggggggcggcgggcccucccgcagaacaccaugcgcucuucggaa

SEQ ID NO: 1774 - RNA, 100 nt, Artificial Sequence
  Description of Artificial Sequence: Synthetic polynucleotide
gaagcaaagaaggggcagagggagcccgugagcugagugggccagggacugggagaaggagugaggaggcagggccggcaugccucugcugcuggccaga

SEQ ID NO: 1775 - RNA, 54 nt, Artificial Sequence
  Description of Artificial Sequence: Synthetic oligonucleotide
gugcugggcggggggcggcgggcccucccgcagaacaccaugcgcucuucggga

SEQ ID NO: 1776 - RNA, 54 nt, Artificial Sequence
  Description of Artificial Sequence: Synthetic oligonucleotide
gugcugggcggggggcggcgggcccucccgcagaacaccaugcgcuccacggaa

SEQ ID NO: 1777 - RNA, 35 nt, Artificial Sequence
  Description of Artificial Sequence: Synthetic oligonucleotide
gggcccucccgcagaacaccaugcgcuccacggaa

SEQ ID NO: 1778 - RNA, 30 nt, Artificial Sequence
  Description of Artificial Sequence: Synthetic oligonucleotide
cucccgcagaacaccaugcgcuccacggaa

SEQ ID NO: 1779 - RNA, 55 nt, Artificial Sequence
  Description of Artificial Sequence: Synthetic oligonucleotide
gugcugggcggggggcggcgggcccucccgcagaacaccaugcgcuccacggaag

SEQ ID NO: 1780 - RNA, 54 nt, Artificial Sequence
  Description of Artificial Sequence: Synthetic oligonucleotide
gugcugggcggggggcggcgggcccucccgcagaacaccaugcgcuccucggaa

SEQ ID NO: 1781 - RNA, 10 nt, Artificial Sequence
  Description of Artificial Sequence: Synthetic oligonucleotide
ugugaccugg

SEQ ID NO: 1782 - RNA, 10 nt, Artificial Sequence
  Description of Artificial Sequence: Synthetic oligonucleotide
ugugauuugg

SEQ ID NO: 1783 - RNA, 10 nt, Artificial Sequence
  Description of Artificial Sequence: Synthetic oligonucleotide
uauaauuugg

SEQ ID NO: 1784 - RNA, 11 nt, Artificial Sequence
  Description of Artificial Sequence: Synthetic oligonucleotide
ccugacccagu

SEQ ID NO: 1785 - RNA, 18 nt, Artificial Sequence
  Description of Artificial Sequence: Synthetic oligonucleotide
gucugcaccugucacuag

SEQ ID NO: 1786 - RNA, 10 nt, Artificial Sequence
  Description of Artificial Sequence: Synthetic oligonucleotide
gugacccaag

SEQ ID NO: 1787 - RNA, 15 nt, Artificial Sequence
  Description of Artificial Sequence: Synthetic oligonucleotide
guggccacugagaag

SEQ ID NO: 1788 - RNA, 10 nt, Artificial Sequence
  Description of Artificial Sequence: Synthetic oligonucleotide
gugacccaau

SEQ ID NO: 1789 - RNA, 10 nt, Artificial Sequence
  Description of Artificial Sequence: Synthetic oligonucleotide
gugacccaac

SEQ ID NO: 1790 - RNA, 15 nt, Artificial Sequence
  Description of Artificial Sequence: Synthetic oligonucleotide
guggccacugagaaa

SEQ ID NO: 1791 - RNA, 50 nt, Artificial Sequence
  Description of Artificial Sequence: Synthetic oligonucleotide
aguguaugaugccuguuacuagcauucacauggaacaaauugcugccgug

SEQ ID NO: 1792 - RNA, 52 nt, Artificial Sequence
  Description of Artificial Sequence: Synthetic oligonucleotide
cugaggagcgccuugacagcagccaugggagggccgcccccuaccucaguga

SEQ ID NO: 1793 - RNA, 52 nt, Artificial Sequence
  Description of Artificial Sequence: Synthetic oligonucleotide
cuguggagcgccuugacagcagccaugggagggccgcccccuaccucaguga

SEQ ID NO: 1794 - RNA, 100 nt, Artificial Sequence
  Description of Artificial Sequence: Synthetic polynucleotide
uggccguguagugcuacccagcgcuggcugccuccucagcauugcaauuccucucccaucugggcaccagucagcuacccuggugggaaucuggguagcc

SEQ ID NO: 1795 - RNA, 99 nt, Artificial Sequence
  Description of Artificial Sequence: Synthetic oligonucleotide
ggccguguagugcuacccagcgcuggcugccuccucagcauugcaauuccucucccaucugggcaccagucagcuacccuggugggaaucuggguagcc

SEQ ID NO: 1796 - RNA, 54 nt, Artificial Sequence
  Description of Artificial Sequence: Synthetic oligonucleotide
uccugaggagcgccuugacagcagccaugggagggccgcccccuaccucaguga

SEQ ID NO: 1797 - RNA, 35 nt, Artificial Sequence
  Description of Artificial Sequence: Synthetic oligonucleotide
cugaggagcgccuugacagcagccaugggagggcc

SEQ ID NO: 1798 - RNA, 52 nt, Artificial Sequence
  Description of Artificial Sequence: Synthetic oligonucleotide
cugcggagcgccuugacagcagccaugggagggccgcccccuaccucaguga

SEQ ID NO: 1799 - DNA, 2313 bp, Artificial Sequence
  Description of Artificial Sequence: Synthetic polynucleotide
ctgcgcgctcgctcgctcactgaggccgcccgggcaaagcccgggcgtcgggcgacctttggtcgcccggcctcagtgagcgagcgagcgcgcagagagggagtggccaactccatcactaggggttccttgtagttaatgattaacccgccatgctacttatctaccagggtaatggggatcctctagaactatagctagtcgacattgattattgactagttattaatagtaatcaattacggggtcattagttcatagcccatatatggagttccgcgttacataacttacggtaaatggcccgcctggctgaccgcccaacgacccccgcccattgacgtcaataatgacgtatgttcccatagtaacgccaatagggactttccattgacgtcaatgggtggagtatttacggtaaactgcccacttggcagtacatcaagtgtatcatatgccaagtacgccccctattgacgtcaatgacggtaaatggcccgcctggcattatgcccagtacatgaccttatgggactttcctacttggcagtacatctacgtattagtcatcgctattaccatgtcgaggccacgttctgcttcactctccccatctcccccccctccccacccccaattttgtatttatttattttttaattattttgtgcagcgatgggggcggggggggggggcgcgcgccaggcggggcggggcggggcgaggggcggggcggggcgaggcggagaggtgcggcggcagccaatcagagcggcgcgctccgaaagtttccttttatggcgaggcggcggcggcggcggccctataaaaagcgaagcgcgcggcgggcgggagcaagctttattgcggtagtttatcacagttaaattgctaacgcagtcagtgcttctgacacaacagtctcgaacttaagctgcagaagttggtcgtgaggcactgggcaggtaagtatcaaggttacaagacaggtttaaggagaccaatagaaactgggcttgtcgagacagagaagactcttgcgtttctgataggcacctattggtcttactgacatccactttgcctttctctccacaggtgtccactcccagttcaattacagctcttaaggctagagtacttaatacgactcactataggctagtaatacgactcactatagatggtgagcaagggcgaggagctgttcaccggggtggtgcccatcctggtcgagctggacggcgacgtaaacggccacaagttcagcgtgtccggcgagggcgagggcgatgccacctacggcaagctgaccctgaagttcatctgcaccaccggcaagctgcccgtgccctggcccaccctcgtgaccaccctgacctacggcgtgcagtgcttcagccgctaccccgaccacatgaagcagcacgacttcttcaagtccgccatgcccgaaggctacgtccaggagcgcaccatcttcttcaaggacgacggcaactacaagacccgcgccgaggtgaagttcgagggcgacaccctggtgaaccgcatcgagctgaagggcatcgacttcaaggaggacggcaacatcctggggcacaagctggagtacaactacaacagccacaacgtctatatcatggccgacaagcagaagaacggcatcaaggtgaacttcaagatccgccacaacatcgaggacggcagcgtgcagctcgccgaccactaccagcagaacacccccatcggcgacggccccgtgctgctgcccgacaaccactacctgagcacccagtccgccctgagcaaagaccccaacgagaagcgcgatcacatggtcctgctggagttcgtgaccgccgccgggatcactctcggcatggacgagctgtacaagtaaagcggccctagcgtttaaacgggccctctagactcgaggacggggtgaactacgcctgaggatccgatctttttccctctgccaaaaattatggggacatcatgaagccccttgagcatctgacttctggctaataaaggaaatttattttcattgcaatagtgtgttggaattttttgtgtctctcactcggaagcaattcgttgatctgaatttcgaccacccataatacccattaccctggtagataagtagcatggcgggttaatcattaactacaaggaacccctagtgatggagttggccactccctctctgcgcgctcgctcgctcactgaggccgggcgaccaaaggtcgcccgacgcccgggctttgcccgggcggcctcagtgagcgagcgagcgcgcag

SEQ ID NO: 1800 - DNA, 2232 bp, Artificial Sequence
  Description of Artificial Sequence: Synthetic polynucleotide
atggctgccgatggttatcttccagattggctcgaggacaaccttagtgaaggaattcgcgagtggtgggctttgaaacctggagcccctcaacccaaggcaaatcaacaacatcaagacaacgctcgaggtcttgtgcttccgggttacaaataccttggacccggcaacggactcgacaagggggagccggtcaacgcagcagacgcggcggccctcgagcacgacaaggcctacgaccagcagctcaaggccggagacaacccgtacctcaagtacaaccacgccgacgccgagttccaggagcggctcaaagaagatacgtcttttgggggcaacctcgggcgagcagtcttccaggccaaaaagaggcttcttgaacctcttggtctggttgaggaagcggctaagacggctcctggaaagaagaggcctgtagagcagtctcctcaggaaccggactcctccgcgggtattggcaaatcgggtgcacagcccgctaaaaagagactcaatttcggtcagactggcgacacagagtcagtcccagaccctcaaccaatcggagaacctcccgcagccccctcaggtgtgggatctcttacaatggcttcaggtggtggcgcaccagtggcagacaataacgaaggtgccgatggagtgggtagttcctcgggaaattggcattgcgattcccaatggctgggggacagagtcatcaccaccagcacccgaacctgggccctgcccacctacaacaatcacctctacaagcaaatctccaacagcacatctggaggatcttcaaatgacaacgcctacttcggctacagcaccccctgggggtattttgacttcaacagattccactgccacttctcaccacgtgactggcagcgactcatcaacaacaactggggattccggcctaagcgactcaacttcaagctcttcaacattcaggtcaaagaggttacggacaacaatggagtcaagaccatcgccaataaccttaccagcacggtccaggtcttcacggactcagactatcagctcccgtacgtgctcgggtcggctcacgagggctgcctcccgccgttcccagcggacgttttcatgattcctcagtacgggtatctgacgcttaatgatggaagccaggccgtgggtcgttcgtccttttactgcctggaatatttcccgtcgcaaatgctaagaacgggtaacaacttccagttcagctacgagtttgagaacgtacctttccatagcagctacgctcacagccaaagcctggaccgactaatgaatccactcatcgaccaatacttgtactatctctcaaagactattaacggttctggacagaatcaacaaacgctaaaattcagtgtggccggacccagcaacatggctgtccagggaagaaactacatacctggacccagctaccgacaacaacgtgtctcaaccactgtgactcaaaacaacaacagcgaatttgcttggcctggagcttcttcttgggctctcaatggacgtaatagcttgatgaatcctggacctgctatggccagccacaaagaaggagaggaccgtttctttcctttgtctggatctttaatttttggcaaacaaggaactggaagagacaacgtggatgcggacaaagtcatgataaccaacgaagaagaaattaaaactactaacccggtagcaacggagtcctatggacaagtggccacaaaccaccagagtgatgggactttggcggtgccttttaaggcacaggcgcagaccggctgggttcaaaaccaaggaatacttccgggtatggtttggcaggacagagatgtgtacctgcaaggacccatttgggccaaaattcctcacacggacggcaactttcacccttctccgctgatgggagggtttggaatgaagcacccgcctcctcagatcctcatcaaaaacacacctgtacctgcggatcctccaacggccttcaacaaggacaagctgaactctttcatcacccagtattctactggccaagtcagcgtggagatcgagtgggagctgcagaaggaaaacagcaagcgctggaacccggagatccagtacacttccaactattacaagtctaataatgttgaatttgctgttaatactgaaggtgtatatagtgaaccccgccccattggcaccagatacctgactcgtaatctgtaa

SEQ ID NO: 1801 - DNA, 1984 bp, Artificial Sequence
  Description of Artificial Sequence: Synthetic polynucleotide
ctgcgcgctcgctcgctcactgaggccgcccgggcaaagcccgggcgtcgggcgacctttggtcgcccggcctcagtgagcgagcgagcgcgcagagagggagtgtagccatgctctaggaagatcaattcaattcacgcgtcgacattgattattgactagttattaatagtaatcaattacggggtcattagttcatagcccatatatggagttccgcgttacataacttacggtaaatggcccgcctggctgaccgcccaacgacccccgcccattgacgtcaataatgacgtatgttcccatagtaacgccaatagggactttccattgacgtcaatgggtggagtatttacggtaaactgcccacttggcagtacatcaagtgtatcatatgccaagtacgccccctattgacgtcaatgacggtaaatggcccgcctggcattatgcccagtacatgaccttatgggactttcctacttggcagtacatctacgtattagtcatcgctattaccatgtcgaggccacgttctgcttcactctccccatctcccccccctccccacccccaattttgtatttatttattttttaattattttgtgcagcgatgggggcggggggggggggcgcgcgccaggcggggcggggcggggcgaggggcggggcggggcgaggcggagaggtgcggcggcagccaatcagagcggcgcgctccgaaagtttccttttatggcgaggcggcggcggcggcggccctataaaaagcgaagcgcgcggcgggcgggagcaagcttgaactgaaaaaccagaaagttaactggtaagtttagtctttttgtcttttatttcaggtcccggatccggtggtggtgcaaatcaaagaactgctcctcagtggatgttgcctttacttctaggcctgtacggaagtgttacttctgctctaaaagctgcggaattgtacccgcggccgatccaccggtatgtggactttcgggcgccgcgcagttgccggcctcctggcgtccccgagcccggcccaggcccagaccctcacccgggccccgcggctggcagagttggcccagctctgcagccgccggggcctgcgcaccggcatcaatgcgacctgcacaacccaccacaccagttcgaacctccgtggcctcaaccagattcggaatgtcaaaaggcagagtgtctacttgatgaatttgaggaaatcgggaactttgggccacccaggctctctagatgacaccacctatgaaagactagcagaggaaacgctggactctttagcagagttttttgaagaccttgcagacaagccatacacctttgaggactatgatgtttcctttgggagtggtgtcttaactgttaaactgggtggagatctaggaacctacgtgatcaacaagcagacgccaaacaagcaaatctggttatcttctccatccagtggacccaagcgttatgactggactgggaaaaactgggtgtattcccacgacggcgtttccctccatgagctgctgggcgcagagctcactaaagccttaaaaaccaaactggacttgtcttccttggcctattccggaaaagacgcttatccttatgacgtgcctgactatgcctgactcgaggacggggtgaactacgcctgaggatccgatctttttccctctgccaaaaattatggggacatcatgaagccccttgagcatctgacttctggctaataaaggaaatttattttcattgcaatagtgtgttggaattttttgtgtctctcactcggcctaggtagataagtagcatggcgggttaatcattaactacaaggaacccctagtgatggagttggccactccctctctgcgcgctcgctcgctcactgaggccgggcgaccaaaggtcgcccgacgcccgggctttgcccgggcggcctcagtgagcgagcgagcgcgcag

SEQ ID NO: 1802 - DNA, 2911 bp, Artificial Sequence
  Description of Artificial Sequence: Synthetic polynucleotide
cctgcaggcagctgcgcgctcgctcgctcactgaggccgcccgggcaaagcccgggcgtcgggcgacctttggtcgcccggcctcagtgagcgagcgagcgcgcagagagggagtggccaactccatcactaggggttccttgtagttaatgattaacccgccatgctacttatctacgtagccatgcgtcgacataacgcgtcgacattgattattgactagttattaatagtaatcaattacggggtcattagttcatagcccatatatggagttccgcgttacataacttacggtaaatggcccgcctggctgaccgcccaacgacccccgcccattgacgtcaataatgacgtatgttcccatagtaacgccaatagggactttccattgacgtcaatgggtggagtatttacggtaaactgcccacttggcagtacatcaagtgtatcatatgccaagtacgccccctattgacgtcaatgacggtaaatggcccgcctggcattatgcccagtacatgaccttatgggactttcctacttggcagtacatctacgtattagtcatcgctattaccatgtcgaggccacgttctgcttcactctccccatctcccccccctccccacccccaattttgtatttatttattttttaattattttgtgcagcgatgggggcggggggggggggcgcgcgccaggcggggcggggcggggcgaggggcggggcggggcgaggcggagaggtgcggcggcagccaatcagagcggcgcgctccgaaagtttccttttatggcgaggcggcggcggcggcggccctataaaaagcgaagcgcgcggcgggcgggagcaagcttcgtttagtgaaccgtcagatcgcctggagacgccatccacgctgttttgacctccatagaagacaccgggaccgatccagcctccgcggattcgaatcccggccgggaacggtgcattggaacgcggattccccgtgccaagagtgacgtaagtaccgcctatagagtctataggcccacaaaaaatgctttcttcttttaatatacttttttgtttatcttatttctaatactttccctaatctctttctttcagggcaataatgatacaatgtatcatgcctctttgcaccattctaaagaataacagtgataatttctgggttaaggcaatagcaatatttctgcatataaatatttctgcatataaattgtaactgatgtaagaggtttcatattgctaatagcagctacaatccagctaccattctgcttttattttatggttgggataaggctggattattctgagtccaagctaggcccttttgctaatcatgttcatacctcttatcttcctcccacagctcctgggcaacgtgctggtctgtgtgctggcccatcactttggcaaagaattgggattcgaaccggtatgtggactttcgggcgccgcgcagttgccggcctcctggcgtccccgagcccggcccaggcccagaccctcacccgggccccgcggctggcagagttggcccagctctgcagccgccggggcctgcgcaccggcatcaatgcgacctgcacaacccaccacaccagttcgaacctccgtggcctcaaccagattcggaatgtcaaaaggcagagtgtctacttgatgaatttgaggaaatcgggaactttgggccacccaggctctctagatgacaccacctatgaaagactagcagaggaaacgctggactctttagcagagttttttgaagaccttgcagacaagccatacacctttgaggactatgatgtttcctttgggagtggtgtcttaactgttaaactgggtggagatctaggaacctacgtgatcaacaagcagacgccaaacaagcaaatctggttatcttctccatccagtggacccaagcgttatgactggactgggaaaaactgggtgtattcccacgacggcgtttccctccatgagctgctgggcgcagagctcactaaagccttaaaaaccaaactggacttgtcttccttggcctattccggaaaagacgcttatccttatgacgtgcctgactatgcctgatgactcgagccattgactagtacaaacaccattgtcacactccacacaaacaccattgtcacactccacacaaacaccattgtcacactccactgcagtcaggtctatcctgaggatgggtggcatccctgtgacccctccccagtgcctctcctggccctggaagttgccactccagtgcccaccagccttgtcctaataaaattaagttgcatcattttgtctgactaggtgtccttctataatattatggggtggaggggggtggtatggagcaaggggcaagttgggaagacaacctgtagggcctgcggggtctattgggaaccaagctggagtgcagtggcacaatcttggctcactgcaatctccgcctcctgggttcaagcgattctcctgcctcagcctcccgagttgttgggattccaggcatgcatgaccaggctcagctaatttttgtttttttggtagagacggggtttcaccatattggccaggctggtctccaactcctaatctcaggtgatctacccaccttggcctcccaaattgctgggattacaggcgtgaaccactgctcccttccctgtccttggcctaggtatcgatgctacgtagataagtagcatggcgggttaatcattaactacagaggaacccctagtgatggagttggccactccctctctgcgcgctcgctcgctcactgaggccgggcgaccaaaggtcgcccgacgcccgggctttgcccgggcggcctcagtgagcgagcgagcgcgcagctgcctgcagg

SEQ ID NO: 1803 - protein, 997 aa, Homo sapiens
MENAHTKTVEEVLGHFGVNESTGLSLEQVKKLKERWGSNELPAEEGKTLLELVIEQFEDLLVRILLLAACISFVLAWFEEGEETITAFVEPFVILLILVANAIVGVWQERNAENAIEALKEYEPEMGKVYRQDRKSVQRIKAKDIVPGDIVEIAVGDKVPADIRLTSIKSTTLRVDQSILTGESVSVIKHTDPVPDPRAVNQDKKNMLFSGTNIAAGKAMGVVVATGVNTEIGKIRDEMVATEQERTPLQQKLDEFGEQLSKVISLICIAVWIINIGHFNDPVHGGSWIRGAIYYFKIAVALAVAAIPEGLPAVITTCLALGTRRMAKKNAIVRSLPSVETLGCTSVICSDKTGTLTTNQMSVCRMFILDRVEGDTCSLNEFTITGSTYAPIGEVHKDDKPVNCHQYDGLVELATICALCNDSALDYNEAKGVYEKVGEATETALTCLVEKMNVFDTELKGLSKIERANACNSVIKQLMKKEFTLEFSRDRKSMSVYCTPNKPSRTSMSKMFVKGAPEGVIDRCTHIRVGSTKVPMTSGVKQKIMSVIREWGSGSDTLRCLALATHDNPLRREEMHLEDSANFIKYETNLTFVGCVGMLDPPRIEVASSVKLCRQAGIRVIMITGDNKGTAVAICRRIGIFGQDEDVTSKAFTGREFDELNPSAQRDACLNARCFARVEPSHKSKIVEFLQSFDEITAMTGDGVNDAPALKKAEIGIAMGSGTAVAKTASEMVLADDNFSTIVAAVEEGRAIYNNMKQFIRYLISSNVGEVVCIFLTAALGFPEALIPVQLLWVNLVTDGLPATALGFNPPDLDIMNKPPRNPKEPLISGWLFFRYLAIGCYVGAATVGAAAWWFIAADGGPRVSFYQLSHFLQCKEDNPDFEGVDCAIFESPYPMTMALSVLVTIEMCNALNSLSENQSLLRMPPWENIWLVGSICLSMSLHFLILYVEPLPLIFQITPLNVTQWLMVLKISLPVILMDETLKFVARNYLEPAILE

SEQ ID NO: 1804 - protein, 1042 aa, Homo sapiens
MENAHTKTVEEVLGHFGVNESTGLSLEQVKKLKERWGSNELPAEEGKTLLELVIEQFEDLLVRILLLAACISFVLAWFEEGEETITAFVEPFVILLILVANAIVGVWQERNAENAIEALKEYEPEMGKVYRQDRKSVQRIKAKDIVPGDIVEIAVGDKVPADIRLTSIKSTTLRVDQSILTGESVSVIKHTDPVPDPRAVNQDKKNMLFSGTNIAAGKAMGVVVATGVNTEIGKIRDEMVATEQERTPLQQKLDEFGEQLSKVISLICIAVWIINIGHFNDPVHGGSWIRGAIYYFKIAVALAVAAIPEGLPAVITTCLALGTRRMAKKNAIVRSLPSVETLGCTSVICSDKTGTLTTNQMSVCRMFILDRVEGDTCSLNEFTITGSTYAPIGEVHKDDKPVNCHQYDGLVELATICALCNDSALDYNEAKGVYEKVGEATETALTCLVEKMNVFDTELKGLSKIERANACNSVIKQLMKKEFTLEFSRDRKSMSVYCTPNKPSRTSMSKMFVKGAPEGVIDRCTHIRVGSTKVPMTSGVKQKIMSVIREWGSGSDTLRCLALATHDNPLRREEMHLEDSANFIKYETNLTFVGCVGMLDPPRIEVASSVKLCRQAGIRVIMITGDNKGTAVAICRRIGIFGQDEDVTSKAFTGREFDELNPSAQRDACLNARCFARVEPSHKSKIVEFLQSFDEITAMTGDGVNDAPALKKAEIGIAMGSGTAVAKTASEMVLADDNFSTIVAAVEEGRAIYNNMKQFIRYLISSNVGEVVCIFLTAALGFPEALIPVQLLWVNLVTDGLPATALGFNPPDLDIMNKPPRNPKEPLISGWLFFRYLAIGCYVGAATVGAAAWWFIAADGGPRVSFYQLSHFLQCKEDNPDFEGVDCAIFESPYPMTMALSVLVTIEMCNALNSLSENQSLLRMPPWENIWLVGSICLSMSLHFLILYVEPLPLIFQITPLNVTQWLMVLKISLPVILMDETLKFVARNYLEPGKECVQPATKSCSFSACTDGISWPFVLLIMPLVIWVYSTDTNFSDMFWS

SEQ ID NO: 1805 - DNA, 4359 bp, Homo sapiens
ggcagcggccgataaatgctattagagcagccgccgcggagccgtccccgacgccacctccttttccttcgccgcagtttcctccgccgctgtcgggcgtgcggcgctgagggacccgggcgagcgcgccgcgcaccgccccgccggctcgcctccctcgccgcgttccgccctcagtggtctgccgggcgccccctcctccggcccgggcggggcctctgatcgcctcaagagagcggggagggggctcgggggccgcggcctgccctcccggcgggcggctgagggcgagggaggccctcccttctggcgaggggagggagggtgggtcaggagcccccaacccgccctgcggagctcggggccgcgcgaggggcggttgtctgggggagggggcgcggggtgattcagcgcccggcgaggcggaagcggccgcaagaggaggaggggagagcccgtccgcgcctgggctcccggggtggcacgagcccgcggccggagtgcgaggcggaggcgaggaggccgcggggacgggaggcgaggccggccgggcccccgaagccatggagaacgcgcacaccaagacggtggaggaggtgctgggccacttcggcgtcaacgagagtacggggctgagcctggaacaggtcaagaagcttaaggagagatggggctccaacgagttaccggctgaagaaggaaaaaccttgctggaacttgtgattgagcagtttgaagacttgctagttaggattttattactggcagcatgtatatcttttgttttggcttggtttgaagaaggtgaagaaacaattacagcctttgtagaaccttttgtaattttactcatattagtagccaatgcaattgtgggtgtatggcaggaaagaaatgctgaaaatgccatcgaagcccttaaggaatatgagcctgaaatgggcaaagtgtatcgacaggacagaaagagtgtgcagcggattaaagctaaagacatagttcctggtgatattgtagaaattgctgttggtgacaaagttcctgctgatataaggttaacttccatcaaatctaccacactaagagttgaccagtcaattctcacaggtgaatctgtctctgtcatcaagcacactgatcccgtccctgacccacgagctgtcaaccaagataaaaagaacatgctgttttctggtacaaacattgctgctgggaaagctatgggagtggtggtagcaactggagttaacaccgaaattggcaagatccgggatgaaatggtggcaacagaacaggagagaacaccccttcagcaaaaactagatgaatttggggaacagctttccaaagtcatctcccttatttgcattgcagtctggatcataaatattgggcacttcaatgacccggttcatggagggtcctggatcagaggtgctatttactactttaaaattgcagtggccctggctgtagcagccattcctgaaggtctgcctgcagtcatcaccacctgcctggctcttggaactcgcagaatggcaaagaaaaatgccattgttcgaagcctcccgtctgtggaaacccttggttgtacttctgttatctgctcagacaagactggtacacttacaacaaaccagatgtcagtctgcaggatgttcattctggacagagtggaaggtgatacttgttcccttaatgagtttaccataactggatcaacttatgcacctattggagaagtgcataaagatgataaaccagtgaattgtcaccagtatgatggtctggtagaattagcaacaatttgtgctctttgtaatgactctgctttggattacaatgaggcaaagggtgtgtatgaaaaagttggagaagctacagagactgctctcacttgcctagtagagaagatgaatgtatttgataccgaattgaagggtctttctaaaatagaacgtgcaaatgcctgcaactcagtcattaaacagctgatgaaaaaggaattcactctagagttttcacgtgacagaaagtcaatgtcggtttactgtacaccaaataaaccaagcaggacatcaatgagcaagatgtttgtgaagggtgctcctgaaggtgtcattgacaggtgcacccacattcgagttggaagtactaaggttcctatgacctctggagtcaaacagaagatcatgtctgtcattcgagagtggggtagtggcagcgacacactgcgatgcctggccctggccactcatgacaacccactgagaagagaagaaatgcaccttgaggactctgccaactttattaaatatgagaccaatctgaccttcgttggctgcgtgggcatgctggatcctccgagaatcgaggtggcctcctccgtgaagctgtgccggcaagcaggcatccgggtcatcatgatcactggggacaacaagggcactgctgtggccatctgtcgccgcatcggcatcttcgggcaggatgaggacgtgacgtcaaaagctttcacaggccgggagtttgatgaactcaacccctccgcccagcgagacgcctgcctgaacgcccgctgttttgctcgagttgaaccctcccacaagtctaaaatcgtagaatttcttcagtcttttgatgagattacagctatgactggcgatggcgtgaacgatgctcctgctctgaagaaagccgagattggcattgctatgggctctggcactgcggtggctaaaaccgcctctgagatggtcctggcggatgacaacttctccaccattgtggctgccgttgaggaggggcgggcaatctacaacaacatgaaacagttcatccgctacctcatctcgtccaacgtcggggaagttgtctgtattttcctgacagcagcccttggatttcccgaggctttgattcctgttcagctgctctgggtcaatctggtgacagatggcctgcctgccactgcactggggttcaaccctcctgatctggacatcatgaataaacctccccggaacccaaaggaaccattgatcagcgggtggctctttttccgttacttggctattggctgttacgtcggcgctgctaccgtgggtgctgctgcatggtggttcattgctgctgacggtggtccaagagtgtccttctaccagctgagtcatttcctacagtgtaaagaggacaacccggactttgaaggcgtggattgtgcaatctttgaatccccatacccgatgacaatggcgctctctgttctagtaactatagaaatgtgtaacgccctcaacagcttgtccgaaaaccagtccttgctgaggatgcccccctgggagaacatctggctcgtgggctccatctgcctgtccatgtcactccacttcctgatcctctatgtcgaacccttgccactcatcttccagatcacaccgctgaacgtgacccagtggctgatggtgctgaaaatctccttgcccgtgattctcatggatgagacgctcaagtttgtggcccgcaactacctggaacctgcaatactggagtaaccgcttcctaaaccattttgcagaaatgtaagggtgttcggttgcgtgcatgtgcgtttttagcaacacatctaccaaccctgtgcatgactgatgttggggaaaaagaaaagtaaaaaacttcccaactcactttgtgttatgtggaggaaatgtgtattaccaatggggttgttagcttttaaatcaaaatactgattacagatgtacaatttagcttaatcagaaagcctctccagagaagtttggtttctttgctgcaagaggaatgaggctctgtaaccttatctaagaacttggaagccgtcagccaagtcgccacatttctctgcaaaatgtcatagcttatataaatgtacagtattcaattgtaatgcatgccttcggttgtaagtagccagatccctctccagtgacattggaacatgctactttttaattggccctgtacagtttgcttatttataaattcattaaaaacactacaggtgttgaatggttaaaatgtaggcctccagttcattttcagttattttctgagtgtgcagacagctatttcgcactgtattaaatgtaacttatttaatgaaatcagaagcagtagacagatgttggtgcaatacaaatattgtgatgcatttatcttaataaaatgctaaatgtcaatttatcactgcgcatgtttgactttagactgtaaatagagatcagtttgtttctttctgtgctggtaacaatgagcgtcgcacagacatggtttcaggtaaataaatctattctatgataaaaaaaaaaaaaaaaa

SEQ ID NO: 1806 - DNA, 8329 bp, Homo sapiens
ggcagcggccgataaatgctattagagcagccgccgcggagccgtccccgacgccacctccttttccttcgccgcagtttcctccgccgctgtcgggcgtgcggcgctgagggacccgggcgagcgcgccgcgcaccgccccgccggctcgcctccctcgccgcgttccgccctcagtggtctgccgggcgccccctcctccggcccgggcggggcctctgatcgcctcaagagagcggggagggggctcgggggccgcggcctgccctcccggcgggcggctgagggcgagggaggccctcccttctggcgaggggagggagggtgggtcaggagcccccaacccgccctgcggagctcggggccgcgcgaggggcggttgtctgggggagggggcgcggggtgattcagcgcccggcgaggcggaagcggccgcaagaggaggaggggagagcccgtccgcgcctgggctcccggggtggcacgagcccgcggccggagtgcgaggcggaggcgaggaggccgcggggacgggaggcgaggccggccgggcccccgaagccatggagaacgcgcacaccaagacggtggaggaggtgctgggccacttcggcgtcaacgagagtacggggctgagcctggaacaggtcaagaagcttaaggagagatggggctccaacgagttaccggctgaagaaggaaaaaccttgctggaacttgtgattgagcagtttgaagacttgctagttaggattttattactggcagcatgtatatcttttgttttggcttggtttgaagaaggtgaagaaacaattacagcctttgtagaaccttttgtaattttactcatattagtagccaatgcaattgtgggtgtatggcaggaaagaaatgctgaaaatgccatcgaagcccttaaggaatatgagcctgaaatgggcaaagtgtatcgacaggacagaaagagtgtgcagcggattaaagctaaagacatagttcctggtgatattgtagaaattgctgttggtgacaaagttcctgctgatataaggttaacttccatcaaatctaccacactaagagttgaccagtcaattctcacaggtgaatctgtctctgtcatcaagcacactgatcccgtccctgacccacgagctgtcaaccaagataaaaagaacatgctgttttctggtacaaacattgctgctgggaaagctatgggagtggtggtagcaactggagttaacaccgaaattggcaagatccgggatgaaatggtggcaacagaacaggagagaacaccccttcagcaaaaactagatgaatttggggaacagctttccaaagtcatctcccttatttgcattgcagtctggatcataaatattgggcacttcaatgacccggttcatggagggtcctggatcagaggtgctatttactactttaaaattgcagtggccctggctgtagcagccattcctgaaggtctgcctgcagtcatcaccacctgcctggctcttggaactcgcagaatggcaaagaaaaatgccattgttcgaagcctcccgtctgtggaaacccttggttgtacttctgttatctgctcagacaagactggtacacttacaacaaaccagatgtcagtctgcaggatgttcattctggacagagtggaaggtgatacttgttcccttaatgagtttaccataactggatcaacttatgcacctattggagaagtgcataaagatgataaaccagtgaattgtcaccagtatgatggtctggtagaattagcaacaatttgtgctctttgtaatgactctgctttggattacaatgaggcaaagggtgtgtatgaaaaagttggagaagctacagagactgctctcacttgcctagtagagaagatgaatgtatttgataccgaattgaagggtctttctaaaatagaacgtgcaaatgcctgcaactcagtcattaaacagctgatgaaaaaggaattcactctagagttttcacgtgacagaaagtcaatgtcggtttactgtacaccaaataaaccaagcaggacatcaatgagcaagatgtttgtgaagggtgctcctgaaggtgtcattgacaggtgcacccacattcgagttggaagtactaaggttcctatgacctctggagtcaaacagaagatcatgtctgtcattcgagagtggggtagtggcagcgacacactgcgatgcctggccctggccactcatgacaacccactgagaagagaagaaatgcaccttgaggactctgccaactttattaaatatgagaccaatctgaccttcgttggctgcgtgggcatgctggatcctccgagaatcgaggtggcctcctccgtgaagctgtgccggcaagcaggcatccgggtcatcatgatcactggggacaacaagggcactgctgtggccatctgtcgccgcatcggcatcttcgggcaggatgaggacgtgacgtcaaaagctttcacaggccgggagtttgatgaactcaacccctccgcccagcgagacgcctgcctgaacgcccgctgttttgctcgagttgaaccctcccacaagtctaaaatcgtagaatttcttcagtcttttgatgagattacagctatgactggcgatggcgtgaacgatgctcctgctctgaagaaagccgagattggcattgctatgggctctggcactgcggtggctaaaaccgcctctgagatggtcctggcggatgacaacttctccaccattgtggctgccgttgaggaggggcgggcaatctacaacaacatgaaacagttcatccgctacctcatctcgtccaacgtcggggaagttgtctgtattttcctgacagcagcccttggatttcccgaggctttgattcctgttcagctgctctgggtcaatctggtgacagatggcctgcctgccactgcactggggttcaaccctcctgatctggacatcatgaataaacctccccggaacccaaaggaaccattgatcagcgggtggctctttttccgttacttggctattggctgttacgtcggcgctgctaccgtgggtgctgctgcatggtggttcattgctgctgacggtggtccaagagtgtccttctaccagctgagtcatttcctacagtgtaaagaggacaacccggactttgaaggcgtggattgtgcaatctttgaatccccatacccgatgacaatggcgctctctgttctagtaactatagaaatgtgtaacgccctcaacagcttgtccgaaaaccagtccttgctgaggatgcccccctgggagaacatctggctcgtgggctccatctgcctgtccatgtcactccacttcctgatcctctatgtcgaacccttgccactcatcttccagatcacaccgctgaacgtgacccagtggctgatggtgctgaaaatctccttgcccgtgattctcatggatgagacgctcaagtttgtggcccgcaactacctggaacctggtaaagagtgtgtgcagcctgccaccaaatcctgctcgttctcggcatgcaccgatgggatttcctggccgtttgtgctgctcataatgcccctggtgatctgggtctatagcacagacactaactttagcgatatgttctggtcttgactgacagttttccataaagaagatgtttaacttaatcaattaatttttttattgtttaaagcaactgtctatttctgctgaattttcacatgaacatactggctggtgatggaggtttcatactctagattttgttttgctttttctgactccagtggggcaagattttccttttttatacacataattaaagtgtccattgacatgtacagagaactaacactattttatgcaaatatttttttgtagatgaaaaagcatgtacagtgttctgtttaatactcatccttgtataaaaaaaatagttgagccagcagacattgtcagcaaattaattggcagcagattttaggaaatgaatgtgtgtggttttttttctaaaactaaatagcatgtattgtgtcttttgcatgatgatccggatttaatttgatatcacagtctaatttttattcataagccaatttttctgcactgagcagagtcttgctacctcagtcagtattgttttggtttgctacttccctcacccactttggcctccgttcaccccaccccaccccacctctccccaccttacccccgccccgcttggcttcttctttaggattgtgatggttcgttctgtttacatcagttttaacgagaggtatgcctgtactcgcttgtgcagaaaacattgttccagattcaatcgactgggtttatgtcccttcacatagtttttaaggttatttatttaaatgtctaatgtattttattgtaacagacattgttttgccaacattgcctatttcagtggcacgtcatctagttttaaaaaaataaaacattttaaatggacagagaaaaataactgtcttgtctttaactcgtaagtggcttacctgggactaacagacatgtccaactttctctccagttcttagctcagaactttagttgtactctgcttgaggggaagaaggctcctgctctgctgtgtaggtagtcataggaattgtattcttaatgtacaggcactaattgtcatctgtgatgtacattttatgcaagtttctgctggcctggtatagagaacataagggcaagtgtgtatgtgtgtgtatgtgtgtgttttgtaaaatctgtaaatagcacatgaccaaatgaacatattgtatagaactatttttatttgaatgtggcactaaccaccaccaccgttactacgatcaatgtttgcgcatgttcgagatgagtctcaccaacagtgtgtaagtcattaacagtcctaactgtggtgttttcctccaatgccttccaacatccatcaactaacgtgagtattttcttcctgggatttggatgctttagcctaaaggtgactgccaccaagtgagataactgtatgtcactaacttataagccgcctccatggcagatgctgctgtgctccctgatgccctgtgagcaccggggttgcctgtggcgcctgccatgtgactcgggcgcagcatcagctggctggaggtgtggctttcatagacctccacaggctgcctaggacaagatgaccaggagggcccaagccagacaaaagccggagtggggagagaggcatttcagccagaccaacaggctgaaggagctgtgcagactattgctaaaatgagggttcgcagctgccaggagtcatcccagaacattgctacttatttattaaaaagctaaaaactagtgaaagcaagtaactgaaccagtgaactctgggtatcgataggttcgtcttaaataggccacttccccactcccccacccccccttgcttggtcttgtccttggtggctaagacttagctctgcaggggatgttaaagcacagttagtaggacgtggctctgcacagcccaaaaaccagcttactccttagccagggtgtgaggcctcgactatattcttcaaaatgtacttaggctctggttactgggatggccagtagatgtaatgcagatggttggagtttggggagggttaggaggcatcaagcaggacaaggtgctgctgagttcagagggcccacgttcaagggatggaggtggaacctggagaccgactcttaaaagcacagtccgtggttgggtgtggtggctcatgcctgtaagtaagtctcagccctttggaggccacagcagaaggattgcttgagcccaggtactcaaaccagcctgggcaacagagtgaggccctgtcaaaaaaaaatcagccttactgtgaagcctccaaggctgctcgcaggcagctgtggctctcgggaagggaggctgctttgcccagcagggaacatttggggcagggggtaaattttgccagtttgagcatcatgaggtgtaacaagaaatgggttgaatgggccaaatgcaaggagtgcatctctgggctgcaaactgacttgagtgctgcactattgctattccgtgcaaacaaaactcagcttttcctgactcagttccttgacttagtggcctttacaaaaaaagttgagtagtgtgtggcctgctgtcgcacagcccctagttagcttcatggtttctcagcttcagacccctccagcccacagaggagcccatggagggacccacttcccttggtccagacagctgggagtgggttaggcccactgctgttttgagcagggccacttgctccatttcactgaaggctttgctgggtgaaaacacttcagcatctcctcctcaggtcaacccataaagaccaggtccagcaccgtggtcttggcacatccctggcctcaggccctcacctaacagtgaggcagcagctgcccagccccgcaatgtgcctgctgtcaggcagctcttgcctgaaacttacttccacattctttcctgatgggcaggtggctgaaggcccagccatcagtgtcgcttgttgccaccccgtgcctcccttggcctctctgagctttgcccagaagaccaacaatcatacataccctaactgggacaccactctgcagaatgcagatgatccattctggaggaagctgtcccttgagctcagtgagctcccaggcaagcagggcatctggccgacttccctcacaacagctgctcccacatcccctcggactggagcttcagccctgactgaggtgggcagacctaagacctgagaccacaagattagctcagtgtctaccaagcatctagccactgtccagggccagagcataccacgtctgcagtgcctgtgagcagagccagcagttgccctgtgactgtaaccaccaaattgtccaaacacccgctgcagttagcaagaagggtaggcttcaccctcctttactgaggagaatgatgcggaggagtttcctctccagggctaggcaaggcaggcgagcagccagaagccgggtgcccacagggcagggacaggaaggctgtgctgctactggctgctcacttctccatcaacctcaccctctgcaccactaaccaagaccttgtcctcttgcctgtctcgctgctttcacagctgcaacgattgtgtctgcctcatggggttttcctccagagcctttattctgtagccagacgacacgaggagtctgtgtcactgagccagtgcttctagatgctaccctgtgtgggcggcacctcagggacagtaaatcagaaatgctggtcttgaaaccttgaaaagatcaagctgaatgttccttttcatctgtcgctgttgatcttcatctatttaaataggtattctaacgtttcctctctgtatttcatgaagctgatttcctctctctttccttttcagcaatactggagtaaccgcttcctaaaccattttgcagaaatgtaagggtgttcggttgcgtgcatgtgcgtttttagcaacacatctaccaaccctgtgcatgactgatgttggggaaaaagaaaagtaaaaaacttcccaactcactttgtgttatgtggaggaaatgtgtattaccaatggggttgttagcttttaaatcaaaatactgattacagatgtacaatttagcttaatcagaaagcctctccagagaagtttggtttctttgctgcaagaggaatgaggctctgtaaccttatctaagaacttggaagccgtcagccaagtcgccacatttctctgcaaaatgtcatagcttatataaatgtacagtattcaattgtaatgcatgccttcggttgtaagtagccagatccctctccagtgacattggaacatgctactttttaattggccctgtacagtttgcttatttataaattcattaaaaacactacaggtgttgaatggttaaaatgtaggcctccagttcattttcagttattttctgagtgtgcagacagctatttcgcactgtattaaatgtaacttatttaatgaaatcagaagcagtagacagatgttggtgcaatacaaatattgtgatgcatttatcttaataaaatgctaaatgtcaatttatcactgcgcatgtttgactttagactgtaaatagagatcagtttgtttctttctgtgctggtaacaatgagcgtcgcacagacatggtttcaggtaaataaatctattctatgataaaaaaaaaaaaaaaaa

SEQ ID NO: 1807 - protein, 94 aa, Homo sapiens
MGSELETAMETLINVFHAHSGKEGDKYKLSKKELKELLQTELSGFLDAQKDVDAVDKVMKELDENGDGEVDFQEYVVLVAALTVACNNFFWENS

SEQ ID NO: 1808 - DNA, 607 bp, Homo sapiens
ggactgttgaagacaggtctccacacacagctccagcagccacatttgcaaccttggccatctgtccagaacctgctcccacctcaggcccaggccaaccgtgcactgctgcaatgggctctgagctggagacggcgatggagaccctcatcaacgtgttccacgcccactcgggcaaagagggggacaagtacaagctgagcaagaaggagctgaaagagctgctgcagacggagctctctggcttcctggatgcccagaaggatgtggatgctgtggacaaggtgatgaaggagctagacgagaatggagacggggaggtggacttccaggagtatgtggtgcttgtggctgctctcacagtggcctgtaacaatttcttctgggagaacagttgagcagacagccacattgggcagcgcccttcctctccaccctcccagacctgcctcttccccctgcttccacctcaccccacttatccctctccataaccccacccttgcccaccccacccccacccccaccaagggcgcaagagtagcggtccaagcctgcaactcatctttcattaaaggcttctctctcaccagcaaaaaaaaaaaaa

SEQ ID NO: 1809 - DNA, 2232 bp, Artificial Sequence; identical to SEQ ID NO: 1800
  Description of Artificial Sequence: Synthetic polynucleotide

SEQ ID NO: 1810 - DNA, 2232 bp, Artificial Sequence
  Description of Artificial Sequence: Synthetic polynucleotide
atggctgccgatggttatcttccagattggctcgaggacaaccttagtgaaggaattcgcgagtggtgggctttgaaacctggagcccctcaacccaaggcaaatcaacaacatcaagacaacgctcgaggtcttgtgcttccgggttacaaataccttggacccggcaacggactcgacaagggggagccggtcaacgcagcagacgcggcggccctcgagcacgacaaggcctacgaccagcagctcaaggccggagacaacccgtacctcaagtacaaccacgccgacgccgagttccaggagcggctcaaagaagatacgtcttttgggggcaacctcgggcgagcagtcttccaggccaaaaagaggcttcttgaacctcttggtctggttgaggaagcggctaagacggctcctggaaagaagaggcctgtagagcagtctcctcaggaaccggactcctccgcgggtattggcaaatcgggtgcacagcccgctaaaaagagactcaatttcggtcagactggcgacacagagtcagtcccagaccctcaaccaatcggagaacctcccgcagccccctcaggtgtgggatctcttacaatggcttcaggtggtggcgcaccagtggcagacaataacgaaggtgccgatggagtgggtagttcctcgggaaattggcattgcgattcccaatggctgggggacagagtcatcaccaccagcacccgaacctgggccctgcccacctacaacaatcacctctacaagcaaatctccaacagcacatctggaggatcttcaaatgacaacgcctacttcggctacagcaccccctgggggtattttgacttcaacagattccactgccacttctcaccacgtgactggcagcgactcatcaacaacaactggggattccggcctaagcgactcaacttcaagctcttcaacattcaggtcaaagaggttacggacaacaatggagtcaagaccatcgccaataaccttaccagcacggtccaggtcttcacggactcagactatcagctcccgtacgtgctcgggtcggctcacgagggctgcctcccgccgttcccagcggacgttttcatgattcctcagtacgggtatctgacgcttaatgatggaagccaggccgtgggtcgttcgtccttttactgcctggaatatttcccgtcgcaaatgctaagaacgggtaacaacttccagttcagctacgagtttgagaacgtacctttccatagcagctacgctcacagccaaagcctggaccgactaatgaatccactcatcgaccaatacttgtactatctctcaaagactattaacggttctggacagaatcaacaaacgctaaaattcagtgtggccggacccagcaacatggctgtccagggaagaaactacatacctggacccagctaccgacaacaacgtgtctcaaccactgtgactcaaaacaacaacagcgaatttgcttggcctggagcttcttcttgggctctcaatggacgtaatagcttgatgaatcctggacctgctatggccagccacaaagaaggagaggaccgtttctttcctttgtctggatctttaatttttggcaaacaaggaactggaagagacaacgtggatgcggacaaagtcatgataaccaacgaagaagaaattaaaactactaacccggtagcaacggagtcctatggacaagtggccacaaaccaccagagtgcccaaactttggcggtgccttttaaggcacaggcgcagaccggctgggttcaaaaccaaggaatacttccgggtatggtttggcaggacagagatgtgtacctgcaaggacccatttgggccaaaattcctcacacggacggcaactttcacccttctccgctgatgggagggtttggaatgaagcacccgcctcctcagatcctcatcaaaaacacacctgtacctgcggatcctccaacggccttcaacaaggacaagctgaactctttcatcacccagtattctactggccaagtcagcgtggagatcgagtgggagctgcagaaggaaaacagcaagcgctggaacccggagatccagtacacttccaactattacaagtctaataatgttgaatttgctgttaatactgaaggtgtatatagtgaaccccgccccattggcaccagatacctgactcgtaatctgtaa

SEQ ID NO: 1811 - DNA, 12 bp, Artificial Sequence
  Description of Artificial Sequence: Synthetic polynucleotide
agaaagaggcga

SEQ ID NO: 1812 - DNA, 54 bp, Artificial Sequence
  Description of Artificial Sequence: Synthetic polynucleotide
gagggcagaggaagtcttctaacatgcggtgacgtggaggagaatcccggccct

SEQ ID NO: 1813 - DNA, 66 bp, Artificial Sequence
  Description of Artificial Sequence: Synthetic polynucleotide
agaaagaggcgagagggcagaggaagtcttctaacatgcggtgacgtggaggagaatcccggccct

SEQ ID NO: 1814 - DNA, 1377 bp, Artificial Sequence
  Description of Artificial Sequence: Synthetic polynucleotide
atgggatggagctggatctttctctttctcctgtcaggaactacaggtgtcctctctgaggtccagctgcaacagtctggacctgagctggtgaagcctggggcttcagtgaagatatcctgcaagacttctggatacacattcactgaatacaccatacactgggtgaagcagagccatggagagagccttgagtggattggaggtattaatccaaacgatggtggtactatttacaaccagaagttcaagggcaaggccacattgactgtagacaagtcctccaaaacagcctacatggagctccgcagcctgacatctgaggattctgcagtcttttactgtgcaagagggccctccgccaggtttccttactggggccaagggactctggtcactgtctctgcagccaaaacgacacccccatctgtctatccactggcccctggatctgctgcccaaactaactccatggtgaccctgggatgcctggtcaagggctatttccctgagccagtgacagtgacctggaactctggatccctgtccagcggtgtgcacaccttcccagctgtcctgcagtctgacctctacactctgagcagctcagtgactgtcccctccagcacctggcccagcgagaccgtcacctgcaacgttgcccacccggccagcagcaccaaggtggacaagaaaattgtgcccagggattgtggttgtaagccttgcatatgtacagtcccagaagtatcatctgtcttcatcttccccccaaagcccaaggatgtgctcaccattactctgactcctaaggtcacgtgtgttgtggtagacatcagcaaggatgatcccgaggtccagttcagctggtttgtagatgatgtggaggtgcacacagctcagacgcaaccccgggaggagcagttcaacagcactttccgctcagtcagtgaacttcccatcatgcaccaggactggctcaatggcaaggagttcaaatgcagggtcaacagtgcagctttccctgcccccatcgagaaaaccatctccaaaaccaaaggcagaccgaaggctccacaggtgtacaccattccacctcccaaggagcagatggccaaggataaagtcagtctgacctgcatgataacagacttcttccctgaagacattactgtggagtggcagtggaatgggcagccagcggagaactacaagaacactcagcccatcatggacacagatggctcttacttcgtctacagcaagctcaatgtgcagaagagcaactgggaggcaggaaatactttcacctgctctgtgttacatgagggcctgcacaaccaccatactgagaagagcctctcccactctcctggt

SEQ ID NO: 1815 - DNA, 717 bp, Artificial Sequence
  Description of Artificial Sequence: Synthetic polynucleotide
atgatgagtcctgcccagttcctgtttctgttagtgctctggattcgggaaaccaacggtgatgttgtgatgacccagactccactcactttgtcggttaccattggacaaccagcctccatctcttgcaagtcaagtcagagcctcttagatagtgatggaaagacatatttgaattggttgttacagaggccaggccagtctccaaagcgcctaatctatctggtgtctaaactggactctggagtccctgacagattcactggcagtggatcagggacagatttcacactgaaaattagcagagtggaggctgaggatttgggagtttattattgctggcaaggtacacattttcctcggacgttcggtggaggcaccaagctggaaatcaaacgggctgatgctgcaccaactgtatccatcttcccaccatccagtgagcagttaacatctggaggtgcctcagtcgtgtgcttcttgaacaacttctaccccaaagacatcaatgtcaagtggaagattgatggcagtgaacgacaaaatggcgtcctgaacagttggactgatcaggacagcaaagacagcacctacagcatgagcagcaccctcacgttgaccaaggacgagtatgaacgacataacagctatacctgtgaggccactcacaagacatcaacttcacccattgtcaagagcttcaacaggaatgagtgt

SEQ ID NO: 1816 - DNA, 2174 bp, Artificial Sequence
  Description of Artificial Sequence: Synthetic polynucleotide
gaggagccaccatgggatggagctggatctttctctttctcctgtcaggaactacaggtgtcctctctgaggtccagctgcaacagtctggacctgagctggtgaagcctggggcttcagtgaagatatcctgcaagacttctggatacacattcactgaatacaccatacactgggtgaagcagagccatggagagagccttgagtggattggaggtattaatccaaacgatggtggtactatttacaaccagaagttcaagggcaaggccacattgactgtagacaagtcctccaaaacagcctacatggagctccgcagcctgacatctgaggattctgcagtcttttactgtgcaagagggccctccgccaggtttccttactggggccaagggactctggtcactgtctctgcagccaaaacgacacccccatctgtctatccactggcccctggatctgctgcccaaactaactccatggtgaccctgggatgcctggtcaagggctatttccctgagccagtgacagtgacctggaactctggatccctgtccagcggtgtgcacaccttcccagctgtcctgcagtctgacctctacactctgagcagctcagtgactgtcccctccagcacctggcccagcgagaccgtcacctgcaacgttgcccacccggccagcagcaccaaggtggacaagaaaattgtgcccagggattgtggttgtaagccttgcatatgtacagtcccagaagtatcatctgtcttcatcttccccccaaagcccaaggatgtgctcaccattactctgactcctaaggtcacgtgtgttgtggtagacatcagcaaggatgatcccgaggtccagttcagctggtttgtagatgatgtggaggtgcacacagctcagacgcaaccccgggaggagcagttcaacagcactttccgctcagtcagtgaacttcccatcatgcaccaggactggctcaatggcaaggagttcaaatgcagggtcaacagtgcagctttccctgcccccatcgagaaaaccatctccaaaaccaaaggcagaccgaaggctccacaggtgtacaccattccacctcccaaggagcagatggccaaggataaagtcagtctgacctgcatgataacagacttcttccctgaagacattactgtggagtggcagtggaatgggcagccagcggagaactacaagaacactcagcccatcatggacacagatggctcttacttcgtctacagcaagctcaatgtgcagaagagcaactgggaggcaggaaatactttcacctgctctgtgttacatgagggcctgcacaaccaccatactgagaagagcctctcccactctcctggtagaaagaggcgagagggcagaggaagtcttctaacatgcggtgacgtggaggagaatcccggccctatgatgagtcctgcccagttcctgtttctgttagtgctctggattcgggaaaccaacggtgatgttgtgatgacccagactccactcactttgtcggttaccattggacaaccagcctccatctcttgcaagtcaagtcagagcctcttagatagtgatggaaagacatatttgaattggttgttacagaggccaggccagtctccaaagcgcctaatctatctggtgtctaaactggactctggagtccctgacagattcactggcagtggatcagggacagatttcacactgaaaattagcagagtggaggctgaggatttgggagtttattattgctggcaaggtacacattttcctcggacgttcggtggaggcaccaagctggaaatcaaacgggctgatgctgcaccaactgtatccatcttcccaccatccagtgagcagttaacatctggaggtgcctcagtcgtgtgcttcttgaacaacttctaccccaaagacatcaatgtcaagtggaagattgatggcagtgaacgacaaaatggcgtcctgaacagttggactgatcaggacagcaaagacagcacctacagcatgagcagcaccctcacgttgaccaaggacgagtatgaacgacataacagctatacctgtgaggccactcacaagacatcaacttcacccattgtcaagagcttcaacaggaatgagtgttag

SEQ ID NO: 1817 - DNA, 11 bp, Artificial Sequence
  Description of Artificial Sequence: Synthetic polynucleotide
gaggagccacc

SEQ ID NO: 1818 - DNA, 2174 bp, Artificial Sequence
  Description of Artificial Sequence: Synthetic polynucleotide
gaggagccaccatgatgagtcctgcccagttcctgtttctgttagtgctctggattcgggaaaccaacggtgatgttgtgatgacccagactccactcactttgtcggttaccattggacaaccagcctccatctcttgcaagtcaagtcagagcctcttagatagtgatggaaagacatatttgaattggttgttacagaggccaggccagtctccaaagcgcctaatctatctggtgtctaaactggactctggagtccctgacagattcactggcagtggatcagggacagatttcacactgaaaattagcagagtggaggctgaggatttgggagtttattattgctggcaaggtacacattttcctcggacgttcggtggaggcaccaagctggaaatcaaacgggctgatgctgcaccaactgtatccatcttcccaccatccagtgagcagttaacatctggaggtgcctcagtcgtgtgcttcttgaacaacttctaccccaaagacatcaatgtcaagtggaagattgatggcagtgaacgacaaaatggcgtcctgaacagttggactgatcaggacagcaaagacagcacctacagcatgagcagcaccctcacgttgaccaaggacgagtatgaacgacataacagctatacctgtgaggccactcacaagacatcaacttcacccattgtcaagagcttcaacaggaatgagtgtagaaagaggcgagagggcagaggaagtcttctaacatgcggtgacgtggaggagaatcccggccctatgggatggagctggatctttctctttctcctgtcaggaactacaggtgtcctctctgaggtccagctgcaacagtctggacctgagctggtgaagcctggggcttcagtgaagatatcctgcaagacttctggatacacattcactgaatacaccatacactgggtgaagcagagccatggagagagccttgagtggattggaggtattaatccaaacgatggtggtactatttacaaccagaagttcaagggcaaggccacattgactgtagacaagtcctccaaaacagcctacatggagctccgcagcctgacatctgaggattctgcagtcttttactgtgcaagagggccctccgccaggtttccttactggggccaagggactctggtcactgtctctgcagccaaaacgacacccccatctgtctatccactggcccctggatctgctgcccaaactaactccatggtgaccctgggatgcctggtcaagggctatttccctgagccagtgacagtgacctggaactctggatccctgtccagcggtgtgcacaccttcccagctgtcctgcagtctgacctctacactctgagcagctcagtgactgtcccctccagcacctggcccagcgagaccgtcacctgcaacgttgcccacccggccagcagcaccaaggtggacaagaaaattgtgcccagggattgtggttgtaagccttgcatatgtacagtcccagaagtatcatctgtcttcatcttccccccaaagcccaaggatgtgctcaccattactctgactcctaaggtcacgtgtgttgtggtagacatcagcaaggatgatcccgaggtccagttcagctggtttgtagatgatgtggaggtgcacacagctcagacgcaaccccgggaggagcagttcaacagcactttccgctcagtcagtgaacttcccatcatgcaccaggactggctcaatggcaaggagttcaaatgcagggtcaacagtgcagctttccctgcccccatcgagaaaaccatctccaaaaccaaaggcagaccgaaggctccacaggtgtacaccattccacctcccaaggagcagatggccaaggataaagtcagtctgacctgcatgataacagacttcttccctgaagacattactgtggagtggcagtggaatgggcagccagcggagaactacaagaacactcagcccatcatggacacagatggctcttacttcgtctacagcaagctcaatgtgcagaagagcaactgggaggcaggaaatactttcacctgctctgtgttacatgagggcctgcacaaccaccatactgagaagagcctctcccactctcctggttag

SEQ ID NO: 1819 - DNA, 714 bp, Artificial Sequence
  Description of Artificial Sequence: Synthetic polynucleotide
atgagtcctgcccagttcctgtttctgttagtgctctggattcgggaaaccaacggtgatgttgtgatgacccagactccactcactttgtcggttaccattggacaaccagcctccatctcttgcaagtcaagtcagagcctcttagatagtgatggaaagacatatttgaattggttgttacagaggccaggccagtctccaaagcgcctaatctatctggtgtctaaactggactctggagtccctgacagattcactggcagtggatcagggacagatttcacactgaaaattagcagagtggaggctgaggatttgggagtttattattgctggcaaggtacacattttcctcggacgttcggtggaggcaccaagctggaaatcaaacgggctgatgctgcaccaactgtatccatcttcccaccatccagtgagcagttaacatctggaggtgcctcagtcgtgtgcttcttgaacaacttctaccccaaagacatcaatgtcaagtggaagattgatggcagtgaacgacaaaatggcgtcctgaacagttggactgatcaggacagcaaagacagcacctacagcatgagcagcaccctcacgttgaccaaggacgagtatgaacgacataacagctatacctgtgaggccactcacaagacatcaacttcacccattgtcaagagcttcaacaggaatgagtgt

SEQ ID NO: 1820 - DNA, 2171 bp, Artificial Sequence
  Description of Artificial Sequence: Synthetic polynucleotide
gaggagccaccatgggatggagctggatctttctctttctcctgtcaggaactacaggtgtcctctctgaggtccagctgcaacagtctggacctgagctggtgaagcctggggcttcagtgaagatatcctgcaagacttctggatacacattcactgaatacaccatacactgggtgaagcagagccatggagagagccttgagtggattggaggtattaatccaaacgatggtggtactatttacaaccagaagttcaagggcaaggccacattgactgtagacaagtcctccaaaacagcctacatggagctccgcagcctgacatctgaggattctgcagtcttttactgtgcaagagggccctccgccaggtttccttactggggccaagggactctggtcactgtctctgcagccaaaacgacacccccatctgtctatccactggcccctggatctgctgcccaaactaactccatggtgaccctgggatgcctggtcaagggctatttccctgagccagtgacagtgacctggaactctggatccctgtccagcggtgtgcacaccttcccagctgtcctgcagtctgacctctacactctgagcagctcagtgactgtcccctccagcacctggcccagcgagaccgtcacctgcaacgttgcccacccggccagcagcaccaaggtggacaagaaaattgtgcccagggattgtggttgtaagccttgcatatgtacagtcccagaagtatcatctgtcttcatcttccccccaaagcccaaggatgtgctcaccattactctgactcctaaggtcacgtgtgttgtggtagacatcagcaaggatgatcccgaggtccagttcagctggtttgtagatgatgtggaggtgcacacagctcagacgcaaccccgggaggagcagttcaacagcactttccgctcagtcagtgaacttcccatcatgcaccaggactggctcaatggcaaggagttcaaatgcagggtcaacagtgcagctttccctgcccccatcgagaaaaccatctccaaaaccaaaggcagaccgaaggctccacaggtgtacaccattccacctcccaaggagcagatggccaaggataaagtcagtctgacctgcatgataacagacttcttccctgaagacattactgtggagtggcagtggaatgggcagccagcggagaactacaagaacactcagcccatcatggacacagatggctcttacttcgtctacagcaagctcaatgtgcagaagagcaactgggaggcaggaaatactttcacctgctctgtgttacatgagggcctgcacaaccaccatactgagaagagcctctcccactctcctggtagaaagaggcgagagggcagaggaagtcttctaacatgcggtgacgtggaggagaatcccggccctatgagtcctgcccagttcctgtttctgttagtgctctggattcgggaaaccaacggtgatgttgtgatgacccagactccactcactttgtcggttaccattggacaaccagcctccatctcttgcaagtcaagtcagagcctcttagatagtgatggaaagacatatttgaattggttgttacagaggccaggccagtctccaaagcgcctaatctatctggtgtctaaactggactctggagtccctgacagattcactggcagtggatcagggacagatttcacactgaaaattagcagagtggaggctgaggatttgggagtttattattgctggcaaggtacacattttcctcggacgttcggtggaggcaccaagctggaaatcaaacgggctgatgctgcaccaactgtatccatcttcccaccatccagtgagcagttaacatctggaggtgcctcagtcgtgtgcttcttgaacaacttctaccccaaagacatcaatgtcaagtggaagattgatggcagtgaacgacaaaatggcgtcctgaacagttggactgatcaggacagcaaagacagcacctacagcatgagcagcaccctcacgttgaccaaggacgagtatgaacgacataacagctatacctgtgaggccactcacaagacatcaacttcacccattgtcaagagcttcaacaggaatgagtgttag

SEQ ID NO: 1821 - DNA, 2171 bp, Artificial Sequence
  Description of Artificial Sequence: Synthetic polynucleotide
gaggagccaccatgagtcctgcccagttcctgtttctgttagtgctctggattcgggaaaccaacggtgatgttgtgatgacccagactccactcactttgtcggttaccattggacaaccagcctccatctcttgcaagtcaagtcagagcctcttagatagtgatggaaagacatatttgaattggttgttacagaggccaggccagtctccaaagcgcctaatctatctggtgtctaaactggactctggagtccctgacagattcactggcagtggatcagggacagatttcacactgaaaattagcagagtggaggctgaggatttgggagtttattattgctggcaaggtacacattttcctcggacgttcggtggaggcaccaagctggaaatcaaacgggctgatgctgcaccaactgtatccatcttcccaccatccagtgagcagttaacatctggaggtgcctcagtcgtgtgcttcttgaacaacttctaccccaaagacatcaatgtcaagtggaagattgatggcagtgaacgacaaaatggcgtcctgaacagttggactgatcaggacagcaaagacagcacctacagcatgagcagcaccctcacgttgaccaaggacgagtatgaacgacataacagctatacctgtgaggccactcacaagacatcaacttcacccattgtcaagagcttcaacaggaatgagtgtagaaagaggcgagagggcagaggaagtcttctaacatgcggtgacgtggaggagaatcccggccctatgggatggagctggatctttctctttctcctgtcaggaactacaggtgtcctctctgaggtccagctgcaacagtctggacctgagctggtgaagcctggggcttcagtgaagatatcctgcaagacttctggatacacattcactgaatacaccatacactgggtgaagcagagccatggagagagccttgagtggattggaggtattaatccaaacgatggtggtactatttacaaccagaagttcaagggcaaggccacattgactgtagacaagtcctccaaaacagcctacatggagctccgcagcctgacatctgaggattctgcagtcttttactgtgcaagagggccctccgccaggtttccttactggggccaagggactctggtcactgtctctgcagccaaaacgacacccccatctgtctatccactggcccctggatctgctgcccaaactaactccatggtgaccctgggatgcctggtcaagggctatttccctgagccagtgacagtgacctggaactctggatccctgtccagcggtgtgcacaccttcccagctgtcctgcagtctgacctctacactctgagcagctcagtgactgtcccctccagcacctggcccagcgagaccgtcacctgcaacgttgcccacccggccagcagcaccaaggtggacaagaaaattgtgcccagggattgtggttgtaagccttgcatatgtacagtcccagaagtatcatctgtcttcatcttccccccaaagcccaaggatgtgctcaccattactctgactcctaaggtcacgtgtgttgtggtagacatcagcaaggatgatcccgaggtccagttcagctggtttgtagatgatgtggaggtgcacacagctcagacgcaaccccgggaggagcagttcaacagcactttccgctcagtcagtgaacttcccatcatgcaccaggactggctcaatggcaaggagttcaaatgcagggtcaacagtgcagctttccctgcccccatcgagaaaaccatctccaaaaccaaaggcagaccgaaggctccacaggtgtacaccattccacctcccaaggagcagatggccaaggataaagtcagtctgacctgcatgataacagacttcttccctgaagacattactgtggagtggcagtggaatgggcagccagcggagaactacaagaacactcagcccatcatggacacagatggctcttacttcgtctacagcaagctcaatgtgcagaagagcaactgggaggcaggaaatactttcacctgctctgtgttacatgagggcctgcacaaccaccatactgagaagagcctctcccactctcctggttag

SEQ ID NO: 1822 - DNA, 1537 bp, Artificial Sequence
  Description of Artificial Sequence: Synthetic polynucleotide
ctgcgcgctcgctcgctcactgaggccgcccgggcaaagcccgggcgtcgggcgacctttggtcgcccggcctcagtgagcgagcgagcgcgcagagagggagtgtagccatgctctaggaagatcaattcaattcacgcgtccatggcttagaaggcaagaatcctggctgtggaaagatacctaaaggatcaacagctcctggggatttggggttgctctggaaaactcatttgcaccactgctgtgccttggaatgctagttggagtaataaatctctggaacagatttggaatcacacgacctggatggagtgggacagagaaattaacaattacacaagcttaatacactccttaattgaagaatcgcaaaaccagcaagaaaagaatgaacaagaattattggaattagataaatgggcaagtttgtggaattggtttaacataacaaattggctgtggtatataaaattattcataatgatagtaggaggcttggtaggtttaagaatagtttttgctgtactttctatagtgaatagagttaggcagggatattcaccattatcgtttcagacccacctcccaaccccgaggggacccgacaggcccgaaggaatagaagaagaaggtggagagagagacagagacagatccattcgattagtgaacggatctcgacggtatcgatcacgagactagcctcgagcggccgcaattcgaacgctgacgtcatcaacccgctccaaggaatcgcgggcccagtgtcactaggcgggaacacccagcgcgcgtgcgccctggcaggaagatggctgtgagggacagggagtggcgccctgcaatatttgcatgtcgctatgtgttctgggaaatcaccataaacgtgaaatgtctttggatttgggaatcttataagttctgtatgagaccacaccggtgaagcaaagaaggggcagagggagcccgtgagctgagtgggccagggactgggagaaggagtgaggaggcagggccggcatgcctctgctgctggccagaccccttaactcatttgttcccgtctgcacctgtcactagtaacagatgagttaaggggtttggccgtgtagtgctacccagcgctggctgcctcctcagcattgcaattcctctcccatctgggcaccagtcagctaccctggtgggaatctgggtagccctcgaggacggggtgaactacgcctgaggatccgatctttttccctctgccaaaaattatggggacatcatgaagccccttgagcatctgacttctggctaataaaggaaatttattttcattgcaatagtgtgttggaattttttgtgtctctcactcggcctaggtagataagtagcatggcgggttaatcattaactacaaggaacccctagtgatggagttggccactccctctctgcgcgctcgctcgctcactgaggccgggcgaccaaaggtcgcccgacgcccgggctttgcccgggcggcctcagtgagcgagcgagcgcgcag

SEQ ID NO: 1823 - protein, 743 aa, Artificial Sequence
  Description of Artificial Sequence: Synthetic polypeptide
MAADGYLPDWLEDNLSEGIREWWALKPGAPQPKANQQHQDNARGLVLPGYKYLGPGNGLDKGEPVNAADAAALEHDKAYDQQLKAGDNPYLKYNHADAEFQERLKEDTSFGGNLGRAVFQAKKRLLEPLGLVEEAAKTAPGKKRPVEQSPQEPDSSAGIGKSGAQPAKKRLNFGQTGDTESVPDPQPIGEPPAAPSGVGSLTMASGGGAPVADNNEGADGVGSSSGNWHCDSQWLGDRVITTSTRTWALPTYNNHLYKQISNSTSGGSSNDNAYFGYSTPWGYFDFNRFHCHFSPRDWQRLINNNWGFRPKRLNFKLFNIQVKEVTDNNGVKTIANNLTSTVQVFTDSDYQLPYVLGSAHEGCLPPFPADVFMIPQYGYLTLNDGSQAVGRSSFYCLEYFPSQMLRTGNNFQFSYEFENVPFHSSYAHSQSLDRLMNPLIDQYLYYLSKTINGSGQNQQTLKFSVAGPSNMAVQGRNYIPGPSYRQQRVSTTVTQNNNSEFAWPGASSWALNGRNSLMNPGPAMASHKEGEDRFFPLSGSLIFGKQGTGRDNVDADKVMITNEEEIKTTNPVATESYGQVATNHQSAQTLAVPFKAQAQTGWVQNQGILPGMVWQDRDVYLQGPIWAKIPHTDGNFHPSPLMGGFGMKHPPPQILIKNTPVPADPPTAFNKDKLNSFITQYSTGQVSVEIEWELQKENSKRWNPEIQYTSNYYKSNNVEFAVNTEGVYSEPRPIGTRYLTRNL

SEQ ID NO: 1824 - DNA, 2232 bp, Artificial sequence
  Description of Artificial Sequence: Synthetic polynucleotide, capsid sequence
atggctgccgatggttatcttccagattggctcgaggacaaccttagtgaaggaattcgcgagtggtgggctttgaaacctggagcccctcaacccaaggcaaatcaacaacatcaagacaacgctcgaggtcttgtgcttccgggttacaaataccttggacccggcaacggactcgacaagggggagccggtcaacgcagcagacgcggcggccctcgagcacgacaaggcctacgaccagcagctcaaggccggagacaacccgtacctcaagtacaaccacgccgacgccgagttccaggagcggctcaaagaagatacgtcttttgggggcaacctcgggcgagcagtcttccaggccaaaaagaggcttcttgaacctcttggtctggttgaggaagcggctaagacggctcctggaaagaagaggcctgtagagcagtctcctcaggaaccggactcctccgcgggtattggcaaatcgggtgcacagcccgctaaaaagagactcaatttcggtcagactggcgacacagagtcagtcccagaccctcaaccaatcggagaacctcccgcagccccctcaggtgtgggatctcttacaatggcttcaggtggtggcgcaccagtggcagacaataacgaaggtgccgatggagtgggtagttcctcgggaaattggcattgcgattcccaatggctgggggacagagtcatcaccaccagcacccgaacctgggccctgcccacctacaacaatcacctctacaagcaaatctccaacagcacatctggaggatcttcaaatgacaacgcctacttcggctacagcaccccctgggggtattttgacttcaacagattccactgccacttctcaccacgtgactggcagcgactcatcaacaacaactggggattccggcctaagcgactcaacttcaagctcttcaacattcaggtcaaagaggttacggacaacaatggagtcaagaccatcgccaataaccttaccagcacggtccaggtcttcacggactcagactatcagctcccgtacgtgctcgggtcggctcacgagggctgcctcccgccgttcccagcggacgttttcatgattcctcagtacgggtatctgacgcttaatgatggaagccaggccgtgggtcgttcgtccttttactgcctggaatatttcccgtcgcaaatgctaagaacgggtaacaacttccagttcagctacgagtttgagaacgtacctttccatagcagctacgctcacagccaaagcctggaccgactaatgaatccactcatcgaccaatacttgtactatctctcaaggactattaacggttctggacagaatcaacaaacgctaaaattcagtgtggccggacccagcaacatggctgtccagggaagaaactacatacctggacccagctaccgacaacaacgtgtctcaaccactgtgactcaaaacaacaacagcgaatttgcttggcctggagcttcttcttgggctctcaatggacgtaatagcttgatgaatcctggacctgctatggccagccacaaagaaggagaggaccgtttctttcctttgtctggatctttaatttttggcaaacaaggaactggaagagacaacgtggatgcggacaaagtcatgataaccaacgaagaagaaattaaaactactaacccggtagcaacggagtcctatggacaagtggccacaaaccaccagagtggtggtacgttggcggtgccttttaaggcacaggcgcagaccggctgggttcaaaaccaaggaatacttccgggtatggtttggcaggacagagatgtgtacctgcaaggacccatttgggccaaaattcctcacacggacggcaactttcacccttctccgctgatgggagggtttggaatgaagcacccgcctcctcagatcctcatcaaaaacacacctgtacctgcggatcctccaacggccttcaacaaggacaagctgaactctttcatcacccagtattctactggccaagtcagcgtggagatcgagtgggagctgcagaaggaaaacagcaagcgctggaacccggagatccagtacacttccaactattacaagtctaataatgttgaatttgctgttaatactgaaggtgtatatagtgaaccccgccccattggcaccagatacctgactcgtaatctgtaa

SEQ ID NO: 1825 - DNA, 2232 bp, Artificial sequence
  Description of Artificial Sequence: Synthetic polynucleotide, capsid sequence
atggctgccgatggttatcttccagattggctcgaggacaaccttagtgaaggaattcgcgagtggtgggctttgaaacctggagcccctcaacccaaggcaaatcaacaacatcaagacaacgctcgaggtcttgtgcttccgggttacaaataccttggacccggcaacggactcgacaagggggagccggtcaacgcagcagacgcggcggccctcgagcacgacaaggcctacgaccagcagctcaaggccggagacaacccgtacctcaagtacaaccacgccgacgccgagttccaggagcggctcaaagaagatacgtcttttgggggcaacctcgggcgagcagtcttccaggccaaaaagaggcttcttgaacctcttggtctggttgaggaagcggctaagacggctcctggaaagaagaggcctgtagagcagtctcctcaggaaccggactcctccgcgggtattggcaaatcgggtgcacagcccgctaaaaagagactcaatttcggtcagactggcgacacagagtcagtcccagaccctcaaccaatcggagaacctcccgcagccccctcaggtgtgggatctcttacaatggcttcaggtggtggcgcaccagtggcagacaataacgaaggtgccgatggagtgggtagttcctcgggaaattggcattgcgattcccaatggctgggggacagagtcatcaccaccagcacccgaacctgggccctgcccacctacaacaatcacctctacaagcaaatctccaacagcacatctggaggatcttcaaatgacaacgcctacttcggctacagcaccccctgggggtattttgacttcaacagattccactgccacttctcaccacgtgactggcagcgactcatcaacaacaactggggattccggcctaagcgactcaacttcaagctcttcaacattcaggtcaaagaggttacggacaacaatggagtcaagaccatcgccaataaccttaccagcacggtccaggtcttcacggactcagactatcagctcccgtacgtgctcgggtcggctcacgagggctgcctcccgccgttcccagcggacgttttcatgattcctcagtacgggtatctgacgcttaatgatggaagccaggccgtgggtcgttcgtccttttactgcctggaatatttcccgtcgcaaatgctaagaacgggtaacaacttccagttcagctacgagtttgagaacgtacctttccatagcagctacgctcacagccaaagcctggaccgactaatgaatccactcatcgaccaatacttgtactatctctcaaggactattaacggttctggacagaatcaacaaacgctaaaattcagtgtggccggacccagcaacatggctgtccagggaagaaactacatacctggacccagctaccgacaacaacgtgtctcaaccactgtgactcaaaacaacaacagcgaatttgcttggcctggagcttcttcttgggctctcaatggacgtaatagcttgatgaatcctggacctgctatggccagccacaaagaaggagaggaccgtttctttcctttgtctggatctttaatttttggcaaacaaggaactggaagagacaacgtggatgcggacaaagtcatgataaccaacgaagaagaaattaaaactactaacccggtagcaacggagtcctatggacaagtggccacaaaccaccagagtgatgggactttggcgacgccgtttaaggcacaggcgcagaccggctgggttcaaaaccaaggaatacttccgggtatggtttggcaggacagagatgtgtacctgcaaggacccatttgggccaaaattcctcacacggacggcaactttcacccttctccgctgatgggagggtttggaatgaagcacccgcctcctcagatcctcatcaaaaacacacctgtacctgcggatcctccaacggccttcaacaaggacaagctgaactctttcatcacccagtattctactggccaagtcagcgtggagatcgagtgggagctgcagaaggaaaacagcaagcgctggaacccggagatccagtacacttccaactattacaagtctaataatgttgaatttgctgttaatactgaaggtgtatatagtgaaccccgccccattggcaccagatacctgactcgtaatctgtaa

SEQ ID NO: 1826 - DNA, 4327 bp, Artificial sequence
  Description of Artificial Sequence: Synthetic polynucleotide
cctgcaggcagctgcgcgctcgctcgctcactgaggccgcccgggcaaagcccgggcgtcgggcgacctttggtcgcccggcctcagtgagcgagcgagcgcgcagagagggagtggccaactccatcactaggggttccttgtagttaatgattaacccgccatgctacttatctacgtagccatgcgtcgacataacgcgtcgacattgattattgactagttattaatagtaatcaattacggggtcattagttcatagcccatatatggagttccgcgttacataacttacggtaaatggcccgcctggctgaccgcccaacgacccccgcccattgacgtcaataatgacgtatgttcccatagtaacgccaatagggactttccattgacgtcaatgggtggagtatttacggtaaactgcccacttggcagtacatcaagtgtatcatatgccaagtacgccccctattgacgtcaatgacggtaaatggcccgcctggcattatgcccagtacatgaccttatgggactttcctacttggcagtacatctacgtattagtcatcgctattaccatgtcgaggccacgttctgcttcactctccccatctcccccccctccccacccccaattttgtatttatttattttttaattattttgtgcagcgatgggggcggggggggggggcgcgcgccaggcggggcggggcggggcgaggggcggggcggggcgaggcggagaggtgcggcggcagccaatcagagcggcgcgctccgaaagtttccttttatggcgaggcggcggcggcggcggccctataaaaagcgaagcgcgcggcgggcgggagcaagcttcgtttagtgaaccgtcagatcgcctggagacgccatccacgctgttttgacctccatagaagacaccgggaccgatccagcctccgcggattcgaatcccggccgggaacggtgcattggaacgcggattccccgtgccaagagtgacgtaagtaccgcctatagagtctataggcccacaaaaaatgctttcttcttttaatatacttttttgtttatcttatttctaatactttccctaatctctttctttcagggcaataatgatacaatgtatcatgcctctttgcaccattctaaagaataacagtgataatttctgggttaaggcaatagcaatatttctgcatataaatatttctgcatataaattgtaactgatgtaagaggtttcatattgctaatagcagctacaatccagctaccattctgcttttattttatggttgggataaggctggattattctgagtccaagctaggcccttttgctaatcatgttcatacctcttatcttcctcccacagctcctgggcaacgtgctggtctgtgtgctggcccatcactttggcaaagaattgggattcgaaccggtatgtggactttcgggcgccgcgcagttgccggcctcctggcgtccccgagcccggcccaggcccagaccctcacccgggccccgcggctggcagagttggcccagctctgcagccgccggggcctgcgcaccggcatcaatgcgacctgcacaacccaccacaccagttcgaacctccgtggcctcaaccagattcggaatgtcaaaaggcagagtgtctacttgatgaatttgaggaaatcgggaactttgggccacccaggctctctagatgacaccacctatgaaagactagcagaggaaacgctggactctttagcagagttttttgaagaccttgcagacaagccatacacctttgaggactatgatgtttcctttgggagtggtgtcttaactgttaaactgggtggagatctaggaacctacgtgatcaacaagcagacgccaaacaagcaaatctggttatcttctccatccagtggacccaagcgttatgactggactgggaaaaactgggtgtattcccacgacggcgtttccctccatgagctgctgggcgcagagctcactaaagccttaaaaaccaaactggacttgtcttccttggcctattccggaaaagacgcttatccttatgacgtgcctgactatgcctgatgactcgaggacggggtgaactacgcctgaggatgggtggcatccctgtgacccctccccagtgcctctcctggccctggaagttgccactccagtgcccaccagccttgtcctaataaaattaagttgcatcattttgtctgactaggtgtccttctataatattatggggtggaggggggtggtatggagcaaggggcaagttgggaagacaacctgtagggcctgcggggtctattgggaaccaagctggagtgcagtggcacaatcttggctcactgcaatctccgcctcctgggttcaagcgattctcctgcctcagcctcccgagttgttgggattccaggcatgcatgaccaggctcagctaatttttgtttttttggtagagacggggtttcaccatattggccaggctggtctccaactcctaatctcaggtgatctacccaccttggcctcccaaattgctgggattacaggcgtgaaccactgctcccttccctgtccttggcctaggtttcttgagacctctacaagagttggagttgacacttggggtactttcttggtgtaacgaactaatagcctgaaaaaaagaagtcatgtgttttcagcaaggcaagaaactgtctaacatagtagataaaacagagaacacttggccggaatcaactaagatgttgctatgttccattcatcatattatctccatctgcagagtagtgggttagtggagggtagaaaacattctcctgaacaactagttaaacttggctttgagttccacctgtaccacttgcataatcttgggaaagtgagttgcctaattcagtgacattaataaatttattaatttcttctttcaataaaacctggagagagcttcatatgtatcagcatatgctaaacttgaaagatacaagtagaaaatggaaggaaatatatctgactcaatagggatagttcaagggttaaattaaaagtagtaaagtattataattaatctgacatggtacctaatatataataatcatgtattaagaatgccagtcaccattaaaagtcaatgtatgactttaatctactcgaggaaagaaactatgtcttgttcactgttattatctctaaaatccataatcagaagagcaccatgtgtatgagccacacaataaatatctactgtataatatgtctcttcttgtttttaaccttcatagataagactctattgaattgggacattagtccagcaagccattctgtctctgtctcttctatggagggaaaggtttaaccatcaaagactaggtgcatctcccaaacaacctgaatttaatattcaaatatgtatctaaattcatttgttacatttttgtgttcagcttacatattactttttgagcgacatctattcaaggcctactacttgctgctctacaaaatattgccatgctctatttgcccattaactatttcttaaccttcaagggacatgctcagttctgatataccaagatttggtatttaccctcccagcctacatacttccaatcttaagagaacaatttttagactacattcaaatatagacctctccaccccatcaactattttatctctcctctcctatctttcttgacaaagagtgattagaaatatgcaatgtattttcattcttaaaagttctatgctaggtggctcatatattaagtcttaaataattacaaattgataaaaaaaatcagtcaataaaaattacttacgcattctggaatttgtactctccaagctgctcaaaaagctcacaattttgtttgattaaattctgaggctcttccacaagaggtttaaattcatcgaactgaaacataaaagaattgtgttaatagtattatgcctcaggatcagatgcaggttgtttttcacccctctggtcagaatgatatcctttcttcttcctactcaaagccacatgaatagatgaatatcaatgccgctctgtcacaatacattcgaaatcgatgctacgtagataagtagcatggcgggttaatcattaactacagaggaacccctagtgatggagttggccactccctctctgcgcgctcgctcgctcactgaggccgggcgaccaaaggtcgcccgacgcccgggctttgcccgggcggcctcagtgagcgagcgagcgcgcagctgcctgcagg

SEQ ID NO: 1827 - DNA, 2828 bp, Artificial sequence
  Description of Artificial Sequence: Synthetic polynucleotide
cctgcaggcagctgcgcgctcgctcgctcactgaggccgcccgggcaaagcccgggcgtcgggcgacctttggtcgcccggcctcagtgagcgagcgagcgcgcagagagggagtggccaactccatcactaggggttccttgtagttaatgattaacccgccatgctacttatctacgtagccatgcgtcgacataacgcgtcgacattgattattgactagttattaatagtaatcaattacggggtcattagttcatagcccatatatggagttccgcgttacataacttacggtaaatggcccgcctggctgaccgcccaacgacccccgcccattgacgtcaataatgacgtatgttcccatagtaacgccaatagggactttccattgacgtcaatgggtggagtatttacggtaaactgcccacttggcagtacatcaagtgtatcatatgccaagtacgccccctattgacgtcaatgacggtaaatggcccgcctggcattatgcccagtacatgaccttatgggactttcctacttggcagtacatctacgtattagtcatcgctattaccatgtcgaggccacgttctgcttcactctccccatctcccccccctccccacccccaattttgtatttatttattttttaattattttgtgcagcgatgggggcggggggggggggcgcgcgccaggcggggcggggcggggcgaggggcggggcggggcgaggcggagaggtgcggcggcagccaatcagagcggcgcgctccgaaagtttccttttatggcgaggcggcggcggcggcggccctataaaaagcgaagcgcgcggcgggcgggagcaagcttcgtttagtgaaccgtcagatcgcctggagacgccatccacgctgttttgacctccatagaagacaccgggaccgatccagcctccgcggattcgaatcccggccgggaacggtgcattggaacgcggattccccgtgccaagagtgacgtaagtaccgcctatagagtctataggcccacaaaaaatgctttcttcttttaatatacttttttgtttatcttatttctaatactttccctaatctctttctttcagggcaataatgatacaatgtatcatgcctctttgcaccattctaaagaataacagtgataatttctgggttaaggcaatagcaatatttctgcatataaatatttctgcatataaattgtaactgatgtaagaggtttcatattgctaatagcagctacaatccagctaccattctgcttttattttatggttgggataaggctggattattctgagtccaagctaggcccttttgctaatcatgttcatacctcttatcttcctcccacagctcctgggcaacgtgctggtctgtgtgctggcccatcactttggcaaagaattgggattcgaaccggtatgtggactttcgggcgccgcgcagttgccggcctcctggcgtccccgagcccggcccaggcccagaccctcacccgggccccgcggctggcagagttggcccagctctgcagccgccggggcctgcgcaccggcatcaatgcgacctgcacaacccaccacaccagttcgaacctccgtggcctcaaccagattcggaatgtcaaaaggcagagtgtctacttgatgaatttgaggaaatcgggaactttgggccacccaggctctctagatgacaccacctatgaaagactagcagaggaaacgctggactctttagcagagttttttgaagaccttgcagacaagccatacacctttgaggactatgatgtttcctttgggagtggtgtcttaactgttaaactgggtggagatctaggaacctacgtgatcaacaagcagacgccaaacaagcaaatctggttatcttctccatccagtggacccaagcgttatgactggactgggaaaaactgggtgtattcccacgacggcgtttccctccatgagctgctgggcgcagagctcactaaagccttaaaaaccaaactggacttgtcttccttggcctattccggaaaagacgcttatccttatgacgtgcctgactatgcctgatgactcgaggacggggtgaactacgcctgaggatgggtggcatccctgtgacccctccccagtgcctctcctggccctggaagttgccactccagtgcccaccagccttgtcctaataaaattaagttgcatcattttgtctgactaggtgtccttctataatattatggggtggaggggggtggtatggagcaaggggcaagttgggaagacaacctgtagggcctgcggggtctattgggaaccaagctggagtgcagtggcacaatcttggctcactgcaatctccgcctcctgggttcaagcgattctcctgcctcagcctcccgagttgttgggattccaggcatgcatgaccaggctcagctaatttttgtttttttggtagagacggggtttcaccatattggccaggctggtctccaactcctaatctcaggtgatctacccaccttggcctcccaaattgctgggattacaggcgtgaaccactgctcccttccctgtccttggcctaggtatcgatgctacgtagataagtagcatggcgggttaatcattaactacagaggaacccctagtgatggagttggccactccctctctgcgcgctcgctcgctcactgaggccgggcgaccaaaggtcgcccgacgcccgggctttgcccgggcggcctcagtgagcgagcgagcgcgcagctgcctgcagg

1. An adeno-associated viral (AAV) particle comprising a capsid and a viral genome, wherein said capsid penetrates the blood brain barrier following delivery of the AAV particle, wherein the capsid is VOY1101 or VOY801.

2. The AAV particle of claim 1, wherein the capsid is VOY1101.

3. The AAV particle of claim 2, wherein the capsid comprises a nucleic acid sequence given by SEQ ID NO. 1825.

4. The AAV particle of claim 1, wherein the capsid is VOY801.

5. The AAV particle of claim 4, wherein the capsid comprises a nucleic acid sequence given by SEQ ID NO. 1824.

6. An AAV particle comprising a capsid and a viral genome, wherein said capsid penetrates the blood brain barrier following delivery of the AAV particle, wherein the nucleotide sequence of the capsid is at least 95% identical to SEQ ID NO: 1825.

7. The AAV particle of claim 6, wherein the nucleotide sequence of the capsid is at least 99% identical to SEQ ID NO: 1825.

8. An AAV particle comprising a capsid and a viral genome, wherein said capsid penetrates the blood brain barrier following delivery of the AAV particle, wherein the nucleotide sequence of the capsid is at least 95% identical to SEQ ID NO: 1824.

9. The AAV particle of claim 8, wherein the nucleotide sequence of the capsid is at least 99% identical to SEQ ID NO: 1824.

10. The AAV particle of any of claims 1-9, wherein the viral genome comprises a nucleic acid sequence positioned between two inverted terminal repeats (ITRs), wherein said nucleic acid sequence when expressed inhibits or suppresses the expression of one or more genes of interest in a cell, wherein for each gene of interest said nucleic acid sequence comprises a sense strand sequence and an antisense strand sequence, and wherein for each gene of interest said sense sequence and antisense strand sequence share a region of complementarity of at least four nucleotides in length.

11. The AAV particle of claim 10, wherein said nucleic acid sequence when expressed inhibits or suppresses the expression of a gene of interest in a cell, wherein for the gene of interest said nucleic acid sequence comprises a sense strand sequence and an antisense strand sequence, and wherein for the gene of interest said sense sequence and antisense strand sequence share a region of complementarity of at least four nucleotides in length.

12. The AAV particle of claim 10, wherein said nucleic acid sequence when expressed inhibits or suppresses the expression of two genes of interest in a cell, wherein for each gene of interest said nucleic acid sequence comprises a sense strand sequence and an antisense strand sequence, and wherein for each gene of interest said sense sequence and antisense strand sequence share a region of complementarity of at least four nucleotides in length.

13. The AAV particle of claim 10, wherein said nucleic acid sequence when expressed inhibits or suppresses the expression of three, four, or five genes of interest in a cell, wherein for each gene of interest said nucleic acid sequence comprises a sense strand sequence and an antisense strand sequence, and wherein for each gene of interest said sense sequence and antisense strand sequence share a region of complementarity of at least four nucleotides in length.

14. The AAV particle of any one of claims 10-13, wherein for gene(s) of interest, the nucleic acid sequence comprises a sense strand sequence and an antisense strand sequence of an siRNA duplex.

15. The AAV particle of any one of claim 10-13, wherein the region of complementarity is at least 12 nucleotides in length.

16. The AAV particle of claim 15, wherein the region of complementarity is at least 17 nucleotides in length.

17. The AAV particle of any one of claims 10-13, wherein the region of complementarity is between 14 and 21 nucleotides in length.

18. The AAV particle of claim 14, wherein the region of complementarity is 19 nucleotides in length.

19. The AAV particle of any one of claims 10-13, wherein for the gene(s) of interest, the sense strand sequence and the antisense strand sequence are, independently, 30 nucleotides or less.

20. The AAV particle of any one of claims 10-13, wherein for the gene(s) of interest, at least one of the sense strand sequence and the antisense strand sequence comprise a 3′ overhang of at least 1 nucleotide.

21. The AAV particle of claim 20, wherein for the gene(s) of interest, at least one of the sense strand sequence and the antisense strand sequence comprise a 3′ overhang of at least 2 nucleotides.

22. The AAV particle of any one of claims 10-21, wherein the gene(s) of interest are superoxide dismutase 1 (SOD1), chromosome 9 open reading frame 72 (C90RF72), TAR DNA binding protein (TARDBP), ataxin-3 (ATXN3), huntingtin (HTT), amyloid precursor protein (APP), apolipoprotein E (ApoE), microtubule-associated protein tau (MAPT), alpha-synuclein (SNCA), voltage-gated sodium channel alpha subunit 9 (SCN9A), and/or voltage-gated sodium channel alpha subunit 10 (SCN0A).

23. A method for decreasing or inhibiting the expression of a target gene of interest in a cell comprising administering to the cell a composition comprising an AAV particle of any of claims 1-22.

24. The method of claim 23, wherein the cell is a mammalian cell.

25. The method of claim 24, wherein the mammalian cell is a cell of the central nervous system.

26. The method of claim 24, wherein the mammalian cell is a cell of the peripheral nervous system.

27. The method of claim 24, wherein the mammalian cell is a cell of the peripheral nervous system that has a nerve terminal within the central nervous system.

28. The method of claim 25, wherein the cell is a cell of the cortex, brainstem, cerebellum, spinal cord, thalamus, striatum, substantia nigra, caudate nucleus, olivary nucleus, or lateral geniculate nucleus.

29. The method of claim 26, wherein the cell is a cell of a sensory ganglion.

30. The method of claim 26, wherein the cell is a cell of a dorsal root ganglion or a trigeminal ganglion.

31. The method of claim 28, wherein the cell of the spinal cord is a motor neuron.

32. The method of claim 28, wherein the cell of the spinal cord is an astrocyte.

33. The method of claim 28, wherein the cell of the brainstem is a neuron.

34. The method of claim 28, wherein the cell of the cerebellum is a dentate nucleus neuron.

35. The method of claim 28, wherein the cell of the cortex is a sensory cortex, motor cortex, or frontal cortex cell.

36. The method of claim 28, wherein the cell of the cortex is a neuron.

37. The method of claim 28, wherein the cell of the cortex is a pyramidal neuron.

38. The method of claim 28, wherein the cell of the cortex is an astrocyte.

39. The method of claim 28, wherein the cell of the cortex is an upper motor neuron.

40. The method of claim 28, wherein the cell of the substantia nigra is a neuron.

41. The method of claim 28, wherein the cell of the substantia nigra is a dopaminergic neuron.

42. The AAV particle of any of claims 1-9, wherein the viral genome comprises a nucleic acid sequence positioned between two inverted terminal repeats (ITRs), wherein said nucleic acid encodes and expresses a protein of interest in a cell.

43. The AAV particle of claim 42, wherein the protein of interest is an antibody, Aromatic L-Amino Acid Decarboxylase (AADC), ApoE2, Frataxin, survival motor neuron (SMN) protein, glucocerebrosidase, N-sulfoglucosamine sulfohydrolase, N-acetyl-alpha-glucosaminidase, iduronate 2-sulfatase, alpha-L-iduronidase, palmitoyl-protein thioesterase 1, tripeptidyl peptidase 1, battenin, CLN5, CLN6 (linclin), MFSD8, CLN8, aspartoacylase (ASPA), progranulin (GRN), McCP2, beta-galactosidase (GLB1), or gigaxonin (GAN).

44. A method for increasing the level of a protein of interest in a cell comprising administering to the cell a composition comprising an AAV particle of any of claims 1-9, wherein the viral genome comprises a nucleic acid sequence that encodes and expresses the protein of interest in the cell, or a composition comprising an AAV particle of any one of claims 42-43.

45. The method of claim 44, wherein the cell is a mammalian cell.

46. The method of claim 45, wherein the mammalian cell is a cell of the central nervous system.

47. The method of claim 45, wherein the mammalian cell is a cell of the peripheral nervous system.

48. The method of claim 45, wherein the mammalian cell is a cell of the peripheral nervous system that has a nerve terminal within the central nervous system.

49. The method of claim 45, wherein the cell is a cell of the cortex, brainstem, cerebellum, spinal cord, thalamus, striatum, substantia nigra, caudate nucleus, olivary nucleus, or lateral geniculate nucleus.

50. The method of claim 47, wherein the cell is a cell of a sensory ganglion.

51. The method of claim 50, wherein the cell is a cell of the dorsal root ganglion or trigeminal ganglion.

52. The method of claim 49, wherein the cell of the spinal cord is a motor neuron.

53. The method of claim 49, wherein the cell of the spinal cord is an astrocyte.

54. The method of claim 49, wherein the cell of the brainstem is a neuron.

55. The method of claim 49, wherein the cell of the cerebellum is a dentate nucleus neuron.

56. The method of claim 49, wherein the cell of the cortex is a sensory cortex, motor cortex, or frontal cortex cell.

57. The method of claim 49, wherein the cell of the cortex is a neuron.

58. The method of claim 49, wherein the cell of the cortex is a pyramidal neuron.

59. The method of claim 49, wherein the cell of the cortex is an astrocyte.

60. The method of claim 49, wherein the cell of the cortex is an upper motor neuron.

61. The method of claim 49, wherein the cell of the substantia nigra is a neuron.

62. The method of claim 49, wherein the cell of the substantia nigra is a dopaminergic neuron.

63. The method of any one of claims 44-62, wherein the protein of interest is an antibody, Aromatic L-Amino Acid Decarboxylase (AADC), ApoE2, Frataxin, survival motor neuron (SMN) protein, glucocerebrosidase, N-sulfoglucosamine sulfohydrolase, N-acetyl-alpha-glucosaminidase, iduronate 2-sulfatase, alpha-L-iduronidase, palmitoyl-protein thioesterase 1, tripeptidyl peptidase 1, battenin, CLN5, CLN6 (linclin), MFSD8, CLN8, aspartoacylase (ASPA), progranulin (GRN), MeCP2, or beta-galactosidase (GLB1), or gigaxonin (GAN).

64. A method for treating and/or ameliorating a neurological disease in a subject in need of treatment, the method comprising administering to the subject a therapeutically effective amount of a composition comprising an AAV particle of any of claims 1-22.

65. The method of claim 64, wherein the subject is administered the composition comprising the AAV particle by intravenous delivery.

66. The method of claim 64, wherein the subject is administered the composition comprising the AAV particle by intracarotid artery delivery.

67. The method of any one of claims 64-66, wherein 1×10¹² vector genomes (vg)/kg to 1.5×10¹⁴ vg/kg of the AAV particle is administered to the individual.

68. The method of claim 67, wherein 1×10¹² vg/kg to 1.5×10¹² vg/kg of the AAV particle is administered to the individual.

69. The method of claim 68, wherein 1×10¹² vg/kg of the AAV particle is administered to the individual.

70. The method of claim 67, wherein 1.5×10¹³ vg/kg to 2.5×10¹³ vg/kg of the AAV particle is administered to the individual.

71. The method of claim 70, wherein 2.0×10¹³ vg/kg of the AAV particle is administered to the individual.

72. The method of claim 67, wherein 4.0×10¹³ vg/kg to 5.0×10¹³ vg/kg of the AAV particle is administered to the individual.

73. The method of claim 67, wherein 1.0×10¹⁴ vg/kg to 1.5×10¹⁴ vg/kg of the AAV particle is administered to the individual.

74. The method of claim 73, wherein 1.2×10¹⁴ vg/kg of the AAV particle is administered to the individual.

75. The method of any one of claims 64-74, wherein the AAV particles comprises a nucleic acid sequence that encodes a siRNA molecule.

76. The method of claim 75, wherein the siRNA molecule targets a gene of interest, wherein the gene of interest is SOD1, C90RF72, TARDBP, ATXN3, HTT, APP, ApoE, MAPT, SNCA, SCN9A, or SCN10A.

77. A method for treating and/or ameliorating a neurological disease in a subject in need of treatment, the method comprising administering to the subject a therapeutically effective amount of a composition comprising an AAV particle of any of claims 1-9, wherein the viral genome comprises a nucleic acid sequence that encodes a protein of interest.

78. The method of claim 77, wherein the subject is administered the composition comprising the AAV particle by intravenous delivery.

79. The method of claim 78, wherein the subject is administered the composition comprising the AAV particle by intracarotid artery delivery.

80. The method of any one of claims 77-79, wherein 1×10¹² vg/kg to 1.5×10¹⁴ vg/kg of the AAV particle is administered to the individual.

81. The method of claim 77 wherein 1×10¹² vg/kg to 1.5×10¹² vg/kg of the AAV particle is administered to the individual.

82. The method of claim 81, wherein 1×10¹² vg/kg of the AAV particle is administered to the individual.

83. The method of claim 80, wherein 1.5×10¹³ vg/kg to 2.5×10¹³ vg/kg of the AAV particle is administered to the individual.

84. The method of claim 83, wherein 2.0×10¹³ vg/kg of the AAV particle is administered to the individual.

85. The method of claim 80, wherein 4.0×10¹³ vg/kg to 5.0×10¹³ vg/kg of the AAV particle is administered to the individual.

86. The method of claim 80, wherein 1.0×10¹⁴ vg/kg to 1.5×10¹⁴ vg/kg of the AAV particle is administered to the individual.

87. The method of claim 86, wherein 1.2×10¹⁴ vg/kg of the AAV particle is administered to the individual.

88. The method of any one of claims 77-87, wherein the protein is an antibody, AADC, ApoE, Frataxin, survival motor neuron (SWN) protein, glucocerebrosidase, N-sulfoglucosamine sulfohydrolase, N-acetyl-alpha-glucosaminidase, iduronate 2-sulfatase, alpha-L-iduronidase, palmitoyl-protein thioesterase 1, tripeptidyl peptidase 1, battenin, CLN5, CLN6 (linclin), MFSD8, CLN8, ASPA, GRN, McCP2, GLB1, or GAN.

89. The method of claim 88, wherein the ApoE is ApoE2.

90. A pharmaceutical composition comprising an AAV particle of any one of claims 1-22, wherein said AAV particle comprises an AAV capsid and a viral genome, and said viral genome comprises a nucleic acid sequence that, when expressed in a cell, inhibits or suppresses the expression of one or more genes of interest in the cell.

91. The pharmaceutical composition of claim 90, wherein the nucleic sequence encodes an siRNA molecule.

92. The pharmaceutical composition of claim 91, wherein the siRNA molecule targets a gene of interest, wherein the gene of interest is SOD1, C90RF72, TARDBP, ATXN3, HTT, APP, APOE, MAPT, SNCA, SCN9A, or SCN10A.

93. A pharmaceutical composition comprising an AAV particle of any one of claims 1-9, wherein said AAV particle comprises an AAV capsid and a viral genome, and said viral genome encodes a protein of interest.

94. The pharmaceutical of claim 93, wherein the protein is an antibody, AADC, ApoE2, Frataxin, survival motor neuron (S) protein, glucocerebrosidase, N-sulfoglucosamine sulfohydrolase, N-acetyl-alpha-glucosaminidase, iduronate 2-sulfatase, alpha-L-iduronidase, palmitoyl-protein thioesterase 1, tripeptidyl peptidase 1, battenin, CLN5, CLN6 (linclin), MFSD8, CLN8, ASPA, GRN, MeCP2, GLB1, or GAN.

95. A method of decreasing the level of a protein of interest in the CNS or PNS of a subject comprising administering the pharmaceutical composition of any one of claims 90-92.

96. The method of claim 95, wherein the route of administration is intravenous administration.

97. The method of claim 95, wherein the route of administration is intracarotid artery administration.

98. A method of increasing the level of a protein of interest in the CNS of a subject comprising administering the pharmaceutical composition of claim 93 or 94.

99. The method of claim 98, wherein the route of administration is intravenous administration.

100. The method of claim 99, wherein the route of administration is intracarotid artery administration.
